United States Patent Application Publication US 2015/0354009 A1 - sequence listing, part 23

SEQ ID NO: 748 - DNA, 155215 bp, Homo sapiens
agagccggaggagggggaaggagggaggggagagcggtggcggcggctgcgccgggctgtgagtctctcgccgccggaggaagatgaggctgaagattgggttcatcttacgcagtttgctggtggtgggaagcttcctggggctagtggtcctctggtcttccctgaccccgcggccggacgacccaagcccgctgagcaggatgagggtgagtgacccgcccggccccctccggcggcagcgaccggcaacttgttttgtttgcccgcgtgtggagggagcaggggcggcggggtcgcggcacggcgtgggcaccgcagctccgcaggtggtgctggcgcagcgcgggccgagggggtgccgagccccgcgcactccgacctccctggccgccgccggcccgccccctcgccgccccttcctccgctcttccccgccccgggctccgtcgccgacacccgcgctgccgcggcagcggctcgggcggccgctctccgcgccgggactgcgggcggagcgggcggagagccgggtccggggggctgcggccgcccggcgtcccgctctggggggccgggaccgcagcgctcacggcccggggacgcggggttggtccaggctgcggcctgtggcgcgtgcaggcctgaaggaggcgagatgccgatgccgccaccgctggtccggtggaccaggccccttggtccagcctcccctcccgcagccgcccgtctgggggtgttcgcagccccgggctcccccggcccgcccgccggggagtgggagggcgatggcgccccgcctccggctcttacggagagcgcgcctccccctcaactccggcggcggggagccggggtgcgatgcgcggccgaggcctcgcccggaccgccggtccccctcgcgtccctgggcgagggaggggcggttggccggagatggcggaggggcgtccccgccccgcctgcccgccgcccccagccctcagcgcctggggaagcccctgctgtggcagtgctcgggcgctatccgggggaagaggagcagttcctcttccttggctgcggcagggctgcttgggccggaaaactaacttgtgtcggcgcccggccgccccgcgccggctgccggctagctcaggccgacgccgaggggagcggcggcgcggagctcgcggcggctccgctgggacgcatttgtctgccgcccagggcgcgagtgttagcgctgacattccttggatttggagggtttagtcaggcgcctcggaacattagttacccggagccgcgccgcgcggggaagggaccgcgggcactgcggcttccctgacccggcagcgggcggcgcgcaccggcctcgcccccgaccctgacctgcttccccccggatgaaccgttgcaccacctgcttcctcctccccgctgggacagccaactgggccggctgccagtgggggtaggagagggtatgaggggctcacgaccgccgaggcggcggggctgcaggaggagtcgagtcgctctctctgttgtaaagtgctttttgcaagtgtgatgagcatcgcttctatgtcatgtttatttaactttccttctggaaagttagcatcaagaagttgggcaaaaaggcttgtggcgtcctttcaagagtaagaatcctaggaggagatcccattatcagctcttcgcctatatcatgagattagatgtaatctggaagttttagtatttgaagtctctacagcagtggaatccctttgtaatatctgggatagattcccatctaagtcatctaaattgatggtaataaaaagtatcagttttccttttcagtacatttgcggttttaagcttctcagctcatggagtgatggtgatctttttataattttgctctcaatatgacttattgacaaaggataactgaatattgcaattgaggatatttgttttaagtcatcaaatggctttttacatgtagctagaaatgtttaaccccctattttctggtagagaaactgacgaaaaactgacaaaactagctaggttcagaatgtcccgcccttctgatgatcttttaaagaggtggcggaacatcagcatcacttgccaactcgtggaatattttattagtgcaaacaaaggatgggccataatgcccatttcagtactatatggtgatgataaagaaggtgatgatatcttgattttttgtttgtttcagtgtacttgataaagtttctcagtggatccagtgtaatttctgtcatttgtcaaaaacaaaaggtagattttaaagacttaacataattaacattaagaggaatgcttaggtatcagaagagcaagaaagacccttttattggcttcccaggtaaatagtaatacaagcaatttaaagtgtagcttataaataataagagcataaataagggattattgccttcctttaataaagactaacctaggagcttttaaggtacagtgctagaaggacaaatcctgtagggaggattctgactcctgagtttctcctcccccttgtggttcttttacttcgatgactattgcatatattccacccatggtgagatctctgcttctctttaatgctgatctacacatggacttttttggatccctttaaatagcctgaacgatccagtttaccaggtatgggttctgcctctactccagcaagcttgtacctgtggctccattcaccctgtgccactttttgtcttgaactatgaatatgtcatacactaaattctgttacagccttgacaacttgggatggtcctttctcatctgcactatttccttgttttaggtctgtccacctgtggagtcaagacaaaagaaacatgtttcttatttccttcccatctctgggcctcttgccctttctctgaagtgaatgatgtgaaaaatgaccttacatttccgatcatattctgttgtgtgattttaaatattgatttatttgaacatttttgagtgccaattatataccaggcatggtactagttgttaaggaaatactccttgtccttaatctcatggatcttgtaaaaaccacacagcaatcaaacctcgataaatatataaataaaaattgtgctactgctttcatagtgaaaaccatagggggcaagaaaatggaggaatttggtcataaaagccttacttgaagaaatgactattagcagtagcaaatccacacaggtctgaagcaactcgattcttacctcctgtgggaaagaatttattggaggggcataaggcagagtgagagaccgaggcaaatttttgagcaggagtgagagtattaaaaagctttagagcaggaacggaaggaagtacactttgaagaaggccatgtgggctacttgagaaatccaagtacctcgtctgaccctggacttggggttttatacattggcatgattccagggtttgcgtttcttctcccgtgattcttcccttggggtgggctgtctgcatgcgcagtggcctgccagcagcggggaggggctgcctgcagtgtgtttactgaagttttactcatgctcacttgaggcatttttcccttacaatttgagccttcctagaggaagggcatatactagttaaaagctgccattttgcctattagtgcacatgctggagcccacttgcccaactcctgagatcttagtgggaacctgctgataaccagctttaggtgttttctatctaatgggagactgcctttccatggtgttggcgcgaccaattattatttcagagagacagtttaacaacggcctgaccatcacctgatggccgcctgacattcctggtggtggggggcctttcctgccctgctcatgtctgcctagctgcctactctgacttttgaggcgaaatctgaacatttcaagaaaagtagttaatctggaagtgggtggcagcattcttgagaaggagcatttgggcaaaggtcctgaggcaggaggtagcatgagtgaaatagtgagaaactaggagataaatattgttggaacgtggagaatgacaagtagaatgatgccacacaggaaagcatgggtctcgtagtccatgctaaggaggagatcttaagtgcggtgagaagccgttgaaagattttaagtagggaagagtggatttgtgttttgaaaagatcactctggctgcctacagaaagtatgtatttgtctatagaacaggtagcaggagtcctggtgggggtcatcattattcaggtgggacataatccttgcttagattggcagggcggtggtagagatagaaaaaaataaattgattcaagagctcctaaagatgcaaaggcatcaggatttggctattggatatggtagtgaaggtgtcaggaggcctaggatgatagattatttgtttcattatggaaagttctcaaagcaaaatgtataccttcttgtattgtattttatgattatgggaagcttttttttttttagtctttgccctctggatattttaaggtcagcatttattaagattatctgcttggacttgcaaagcacagaaagttcctttaattaaataaattatgtcccagactaacaccatttatcccaggttttagccctgagtgactgtctacagttgacccataagcctctgaaaataaaggtttttaaaggaaatgttgacagatccattaaaacagcagtcccccacctttttagcaccagggactggttttgtcaaagacaattattccacagactgggggagttgggttgggtgggggatggtttggggatgaaactgttccgcctcagatcattaggtattagattctcataaggagtgtgcaacccggatcccttgcatgcagttcacaatagggtttatgctccatgacccagggttggggacccctgcattaaaacattcagtactggtgagaagctgtgtgtaaactaatgactctctggatatgcaaatgcaactttagtcaagtcattaatgccacttaggttcagggtgtatataataggactaattcaggaactagtaggccaagaggttttatgtgataggcaagctaacaggtttgaaaggaatatagcttaaatgaggattagtggctgaactgattaccctggcagtcaagttccaccttaccaaagccattttatctcagtgatgatcagttgtaacctgaaaaattctgcccttgaacatgagattgtacttcaaatggaagctctgtttatactattagggatggagctatcacttagtgaaagtgtagtgtcttaagtggtcactgttctctcagtttcccaggctatacaccttaggattggtttttgtttcctttgctgttttcagtgtcccatcccccttctccccccacacataataatgattaaaaatatcacatcaccaagtctgagaagtctggggtttatagacttcctgaaattaatgcagaacttttgcatacatctacatttttttctaggttgataatcagaagctttcatgtttcctaaagtgtcctctaaaccaaacaaggcttccagccactgaccatgtgccctttgaaggcagggttcatgtttcctgtttgttgagtatttcctccatctttcctggtgctaattttatggaaggcacatattaaatatttttcaaagaaactaaggtacatccatttatgtctcccacataggtctgaacatttcggaaatgtttggcgaattcctaagaattgttgtatttatcacttctgtggaaaagttttccatccagtggtctatgtgaggtcaggcatcagccctgttaccacctgcttgcccctcccccatccccatcctcccctccctaagacctcatgaagaatactgataacacctgaagtgggagttcctgctctcacaatctagttgggggtggggagagctattgcttaatccagtagcaatgtaaagaaataatacaagaactgtcacaaggatatgtttcatcagtagtcaaaccagtaggtggagaaggcttaaaatggcctttggggaatgcacagttactagtaaagagagaatgaaaacttttgaacagcagtctattttgtgacttaggctggttgcatgggatgggagataacgtgtgagatacgatttgggttcctgtataaactgttagacaatagtaaattggagaaagaggaagagagaaaataattcacgaatgaaaagcaaaattctgagcttgagccatctgtaaacagaatatgtggaaattctaacttgagttattaaaaaagttggtcagcaagatttgagtagctattgaatgaaggaaaatgactgtgattattcagctcctaactagataattgtctttgttcatattttgaatttcgattctcattcctgaagaatgaatgtacaatctgaaaagtaactaaattaaagatttcagtaataacagcaacaataatagtttacatatattgaatccttactttgggcctaatacatattctacatgtatttggttgtttatttgtaacaaccaccctctattgcaagtccgatggaatcccaactttatagatgagactgttgtggtatagagaggtgaactctttgtccaagtttattcacttaattaattgtagagccaggattcaatctcaggtgttctaacttcagagctgtgctctctgatcttgcactacagtttttaacaacacagacaagtacacatgggctacattaaaaggtggatatgtagacgctagctgggtaatttcagataaacactgaagacaatatagatggtccctgacttaccatgattcagcttacgatttttgacttttcaatgggtttatcggtgtgtaaccctgtcataagtctgagcacatctggacttaagatgtcttatgattcttcaagtttacagtgggtttgttgcagggtgtaaccccttgtaagtcgaggaacatctgtacatggtaatatgaaagagaatgggaggctggtgcggtggttcatgcttgtaatcccagcgctttgggaggcctaggcaggcgaatcacttgaggtccggagtttgagaccagcctggccaacatggtgaaaccctgtctctactaaaaatacaaaaattagccaggcatggtagcacacccctgtaatcccagctactcaggaggctgaggcaggataattgcttgaagccaggaggcggaggttgcagtaagtggagctcgcgccactacactcaagcctgggcaacaaaacgagactccatctcaaaaaaaaaaaattaaaaacaaaaagaaagagaatgggttggaagggaccactcagggaatgtcagggaaggtgatggccagagcagagtcttcaggagtaagtgtaagactatcatgcaaatctggcggaaaagcattccaggcagagggaacagaagtgcaaaattcctgaggttggaatgaggctggagtatttgaagccagtatggccggagtttgttgagtttggaggtagtacagtacgggatgagcttgaagatgtagtcaggactcagatgatgggggtgtgtggctcttgtggtctgttattagggtgattatttgttttagtttacatttgctgcccattagccattattatcctttcactctcagaagtgtcctgggttggatggtaaattatatggatgtcttgcttaaagtgtattttcctagataaataaaatgagtaataaccctttttggccacagtttgtgggccagatgcacaagtaaacaattgtgctgggtaagacaaaaactgtattagttaagtccactgagtcctgtgggagcacagagaaaggagcatctagtgtatgggactggatgctgtcagagagcttgtcttataaaaagagatgctggagagatgaggacagaggagactgtgcaacagcataaataactgtgaccaatcctggggactacatggctgaaaattgggttggagaggggtggaatggaagagaggactctagaaagataaatagaatctgagccatgaaagactttgaatggtcagagctgggctataaggaataatctggaaacagtgcaagctagattttagtgaggagagaattatgtccgaaggatataatgaagcttaaactaaggagaaggacctagaaactgaatacagaggaagagattatggaagtataatagaattgcccagtgggaggaggaatcattcttgatggtaaaggaaaggatgttgatgcctttagaaggaatacagctgtccaaagcactggctctcaaacttctttaggcttcggagtcacctagagggtgtgagaaaacggattacttggccccatcccccgaatttctgattgagtagatttagggtagagcagataatttgcatttctaactagttccccggggatgctgatgctgctggtccagggatcatgctttgaggagtgccagtctagaggttatatagatttgggggctgcaaaatgaaaatgaaaaatttggtttggtttggcatatagtattttatagaacacaggtcagtcaagtgaaggtgtcttaaccaggtcgatggagctcagaatggaatcagaagtggatgcatttcattggccagagggtggtgtctgaagcacagggagtgggttggtaagttaaaggagcctgtgtggatggaggagaaaaatgtgtgtattaagaagaaacatggaaaatgccttcttttaggctctaggaggttggtggggagagatgaaagaaggcatagacagaagtaaaatgacttagacgatattgcctaaccgtgagcaaaaataatttctttaaggacagggccatcaacaaattcagatgttaaaatgtttgagaactgattagaatgaaagctgaaacgagtggctgtggaagcattacctgcctgctaacctaaccagtagtactttggtctagagagggactacagcagcatcatcattagcatctcagtaaatattgtggcccagaaaaactggttcagatgataaagaagttcaggtcgtgaagagtcatcttcactatgggaaaaatacaaatagagaaaaagttttattagagaactgtaactatcaaagaggaacttaacccatttttggttatatctgggctaccataactttatgtgcctttccacctctccctatccgcaagtctgtgtgtgtgtgtgtgtgtgtgtgtgtgtgtgtgtgtgtgtgtgtgcgcgcacgcgcgtgcgcacagacacctatgtatatatattttagttgtgatcatatataatactatataagatagatattgcaacacatattagtctttttttactcatgtctgaaatctggtgatttgaaaagctgtgactagaaaaccaatttaatatttaaagttggaaaataaattttattctgagaacatgaggcaatttttagtttttagtacattaatttgactgaaggatattaaaaaaacaatagcaaaactatgctattctcagcgtagagaaaatgtatgctcagcatttcaatactcttagtttttaaaaatgaggtttatcattaaattatagttcagccctgtgatcctgaaagcaacactgagacaacatgaactgcagtcacctagggcctatgtctttttggaaagggaagagctaactttcagttgcttaatttgctaagaatcctgaatatttccaaatgagaaatgttctcatttctgcaccattataaattcccttctgggcttcccagccttggaagcattttcaggcatcactcccaagaagcatttaaacatgccgacagggagacctgattcacttcactgaatacaagaactggtacactgaaacttgaggaaaaatttaactttacattatctaattaggtttatagaattggtgcagagcagcctggtttcccaaatctagaaggtacgattaactatagtattatatcaataccaactagtctgcgaataggcttctaagcaataggaatctgttattacaaagaatattttaaactggatgagttaaaattaagtcacatactatcggaaaccattttgtatgagaatagagtagatgacctagtcattttttaattttaatttttaccaattccctgggtttaggaatacatctgagcctcaagaggtatgctactgtcttcagtagtaaacttaacatgctcagtgattatctggcttaagtgtaattttggcatttgtagttacctttatgaaattattttttatgcatagctgtttactatgaaaactatgtattcactggtaaagctatgcttcctatgaaaactgtgtattcgctggtatcttataaaaagaaatggtattatttattatgtaagtatatcttaaataggcagtaactgagaaattgccaaaacttttttggagcgagttcactcttatcagaagttgggtatgtcagcatttttatttattaaactgtttgtattaataattctcctttaacttttagttttccttttaatagaaacatcagccaggtgtggtggctcatgcttataattctagcattttgggagcctgagcctggaggattgcttgaggctagaagcctgggcaatatagcaagaccttgtcgcttataaaacaaacaaaccaaacctgataagatattctttaatgtgagcaaggtttgcaagtagctttttcaactgtgcaaatgcccaactccttctacaagtggaacccttgatttaaaaccaacccattgattctagttattaaagtaaaacaatagtttcaattcctaatgtagtatgaagagacccctttgaaccatttcacagaattttaagaattaatacttgtagagaagtgatatcatgacaacatcaatgtagtatctttatgcatctgtgagaatttggtttttaaaaaatatattccttagaaagcctaaatagaaaacaaaacaaaacaaaagaacagtaaggtacagttgtacattgcaaaaaagaagtccttaagtcatgatgcgtgaagttctctagaagttcttgtcagtacttactgctgtacttcaaattttttattctgtagatatgaagtaaatattttatatactttttattaacatttattatcgcaaaaatagttcccttacaaccctagcataaattaaaactatcagtatacttaagtgagtcatgcaagtgtcattttgccaggatatataaaagatatctgagtaatgatatttagaaatggaaaatgtgaaaatagcatcattataggaagattccaaatctgtttagatttataggttatggtcatttatataaacattttaaaaatgacaggaacagtctaattacgttaagtcaattaagttttttttttgcttgattgtttaatgctcttatgaaaaacacatatttgtaaaagaaattatttgcctagaaaaatttaccatgcaatatatttcatcatattggagttccttttttttttttttttttgagatggagttacactgttgtcatgcaggccggagtgcaatggcacaatctcgactcactgcaacctctgcttcccaggttcaagcaattctcctgcctcagcctcctgagtagctgggattacaggcgcccacaaccatgcccagctaatttttgtatttttagtagagatggggtttcaccatgttggccagactggtctcgaacttctgacctcaggtgatccgcctgccttggtttcccaaagtgctgggattacaggcgtgagccactgcacctgcccagttctttgttaatgaaagcctgtgtacctggaagtcaaaggtatactttgcatagccatttcaaaacttgtcttaggtattttctaaaatgtttgtctcattggatataggttttgattgtgcttacttgagaagacttaaatctttacccttctcctggtagttttcttctggcagttcagtattttgccatgcaatttttattagacaatttgatcattgtgtttcttattgcctaatccaacagatttaatcttttaatctcaaatacagcaaggtgtgctgtgcctttacagtctgtttgcagagttttacatcttcgtttgaaaggaagtgtttaaacacccctgttcaaaaatctgctagttcttgccaggatgatttaaaatgaattttaaaaatccattagatttttggcaaataagctctcaattatggtacagaataaatgactacaaagtgctttttagagtaatggaatagaaatgactgaaattttattactttacacatgcagatttttctactgtggtagatgttcttaaactaaaagattactgtcaagattggaaatttttatcacttaaaatatataattatatttgaacatttaagcagaagattgctggaatggggatatacaggcctgcagtttcgttaactgttgctccctgtgtgatggcctcagaggaaattctaagtccagtgttcgtcaaagaggctggagaatgtttcccttttagtgatcagtgaaaataaatttgcttacagtccagggagatcatggtagtagagaaaaaaatactttagtaaataattttctaaaattctctattctaaaaatatactaagaaaggatgatttttaaataccttggtattttaaagaaatacattttctgtatgaaattaagataactctattcctcttcttatagctaacatttagactctaaatcatggcacatgtaacacttctattttaaaataaatgtagggtacgtgaaagcacagttgttaactttgaaaattttgaagagtggaatcacctacagacataataaagctgaaaataccatggcttttcccaggtcctgctgtttgcttagcctgagaaaggaactgccggtatcatccaagtattggtcaaaatacatatatactgtatggtcattctcatattatttttcccagtgtcctatttgaaaatctgaggaaggttttaatgaatgcggcttcgtcttactttccattaattatgactgcaagaagagtacagccactcttgtttgatcagcctatacactatgactaaatggaaagtgaatcacagccagagagtctaatagtttcacagtggtaaaatcatgttttgtaagaagcagttatcatccttgaccaccgctctgttaactggtaacagtaagataaaagtaaatgttaaaatctttcttatatgttggcaaaaatcacttcctaaagataaatgaatggcttgaaacatttattcttatttgcaactacttctttagcttaagtgacaggtacttatgtttaaaaataacatgtcttgtgtaatgatttatgattctgcatttataaatgcagaaagaataactaaaaggaagttgtaagtgtcagttaaggaatagatgcttttttaaatatagaaaattagaaaacttaaggtaagagcaaaagtaatatacatttgttcagtatttttgttttctggtgaattgagatacttttcctactattcctttaattctttttaaaaataactacaatctatttttttctcccttggaacagtggattcctttctctgattatgaggcctggaatttgagtgattcattggtcagtttcttttgggttccagtgggtgctaaaagtaagaatgattattttaaggataaaaaatgtcagttgtatattttattgactgcaggtagctagaaaaagtaaacttgccatgtgggcacacagcgtgttgcctctgaatgatgaggcaagcaggttactcataatacacacacacacacacacacacacacacacacacagcgtgttgccccgaatgatgaggctagcaggttactcttaatacacacacacacacacacacacacacagacacaacagcgtgttgcctctgaatgatgaggctagtaggttactcataatacacacacacacacacacacacacacagctttttctctatgtacctgattcttttaaattaaagataaccaaacctttgaatgatgaggctagcaggttactcataatacacacacacacacacacacactctgctttttctctatgtacctgatacttttaaattaaagataaccaaacctttgaatggtgaggctagcaggttactcataatccacacacataaacacacacacacacacacacacacacacacacacacacacacacacactgctttttctctgtgtacctgatactttttaattaaaggtaaaaggtaaccgaacctttaactcttgagccagtgataatgagaaaataaaatttcatttctaaaattagagataatggaacttaaaaaaaatgtgttctctgtgtcatctctgtgcaccccctcccactattcctctcacacgctgcactttttttttttttttaaagctgcattaataggctgttatatcctttgaaataccacaggtcttgagagggatgaatgatgaaatgtaaagatcagtgattgagcaggaatgggagaaagattagggattgggttttctggcacaaggctcctttctgtcaaaggactgcaaattttcctgggttgacgtgggcttaattttttttttttccccaaggcagaagaatttttcttagtacagaacaaaatggagtctcctatgtctacttctttctacacagacacagtaacaatctgatctctctttcttttccccacatttcccccttttctattcgacaaaaccgccatcgtcatcatggcccgttctcaatgagctgttgggtacacctcccagacggggcggccgggcagaagcgcccccccacctcccagacggggcggcggccgggcggggtctgccccccacctcccggacggggcggctggcctggcagggactgccccccacctccctgacggcgcggctggccgggcggggactgtcccccacctcccagacggggcggctgccgggcggagacgctcatcacttcccagacggggcggctgccgggtggaggggctcctcacttctcagacggggcggccaggcagagacgctcctcacctcccagacggggtcgcggccgggcagaggcgctcttcacatctcagacgggtcggtggggcagaggcgctccccacattccagacgatgggcggccgggcagagacgctcctcacttcctagacaggatgagggtcgggaagaggctctcctcacttcccagactgggcggcggggcagaggggctcctcacatcccagacgatgggcggccaggcagagacgctcctcacttcctagacggggtggcggccgggcagaggctgcaatctcggcactttgggaggccaaggcaggcggctgggaggtggaggttgtagcgagccgagatcacgccactgcactccagcctgggcaacattgagcactgagtgagcgagactccgtctgcaatccctgcacctagggaggctgaggctggcagatcactcgcggtcaggagctggagaccagcccgaccaacacggcgaaaccccgtctccaccaagaaatatgaaaaccagtcaggcatggtggcgcccgcctgcaatcccaggcactcggcaggctgaggcaggagaatcaggcagggagattgcagtgggtcgagatggcggcagtacagtccagcctcggctcggcatcagagggagaccagggagagggagctcggcatcagagggagaccagggagagggagagggagggggagggggagggggagaagtgggcttaatttaaaattgccttatatatgcagtgatgaaaatcaaatcaaatttaaattactatatggaacaacttcctgataatgtaaaaaaaaaactgatttaggagagggttttcggtactttgaaatattaatattatgaaagttgaacactgatgtttcaatctgcttcactccatccccattacttcttgtcagctgtctatgagcattgggccacttgccacagttttacatgataaccatatttaagtggtaaaaaagatcagaacatatacagtgccttcttaagtcaggttcctgatttatttctggtactatccatttagatacatattaatttacctaatttcttaaatccatggaccagtactgatattcctgtttgtctttatttaggattttacatgtgtacgttaaaaaatacattggtaacagctgactgacaaccaaaaaagtaaaaaagcaaaacaaaaatcaccgtgctttgacaggtttgtcatgaagcaaaatgcatgagaaatttgatctgtttcagtttgcttgttatcagtcagaaatcacctttgctttgcccagagaagactcaggttcactgaattctcttcaccactccgtgaaagtgtgtagcagcatggacagcccatgttatgtacagagtaaatggtgcactgggtggcatgtggaatcttgaaaggacagtgtctcttagatgcttaacttactactgggagtgaagaagatcaatgaatctcaaaaaaaaaaaaaagtggaaaaattccttttggggaaaagaagctagtataatttagggttttaattactatcatacttgattgagagaaatcccttactcttaaaataatacaggtactgcatttcttattttataatactgcttaaatgcttcctgtcctaggcagtataatgaattaaaatgtagtagatatttagcacaagcaaaaaggacttacagtttaggaatactaaattcagaactctgtattgtaacaagttaccaggaagtagtgggggttaaatctgtgctgctgggaaagtgtgttttgttttgtttttttaatttccttgtatacatcttagagtctgcagtttgtatgaaccgtgtgctagtcaagaaagagataaataagcattatttaggttcaagagatttagcaatcttatggttttgggataagctgctatcctagtgatgttttcttgtcactgtctcactgagattttgaaaaactcaaacacatccttaatcaatttgaaagattcctagggaaattacattcaacttgattatggtattccttatgagagcttgggcatagggcaaggagagtgaactttaaggtgtaggaagaagataagtatgtgccacataaaaggaggaggggcctgctatatagtacaaggtcatggcttaagccaatcatttgtcatggggttggggagtctgaaggatgagtgggtctattttaaaaaaaaattgcgttgataaccatgaacattaatccttatgaatactaaatgttctagagaaattatattgatgtgtaattttccttattgtgaaacatatagctccccaaggacaaggtggcagctggcggattaaaaataaaagctgacatcattatatagtaaaagtacacatggactctgacatgggttaaaatgctggtgcaatcactgttaatagcgttagtgagtttcgctgagtgatttactttctgagagcttccttttcctcatctgtaaagtagacataaaatcaacttcatagcaatgttcttgtgcttcctttagatacgtttatcagagcttctatggctgggtttaacttgcacttttatacatactgtttttccttccttctgttccttcttcttggatgagcaccataatttgtacatagtttcaagagtgctttaaaaatgaaaatacttaagttctgcaaacttattatgaattcattattttgaattgtaagtgaaggagggctgaatattgtcttttctcctggacttttagacttttgccttaaaagttatatccttaaatgaacagtgttctcaaatggggaaagaggaaaatattattgtttacttacttttttttttttgagatggagtcttgctctgtcaccaggctggagtgctgtggtgcaatcttggctcactgcaacctccaactccctgggtctcctgccttactctcacgagtagctggcattacaggtgcataccaccatgcccagctaattttttaatatttttagtagagacggatgttggccaggatggtctcgatctcctgacctcgtgatccacccgcctcggccgcccaaagtgctggaattacaggtgtgagccaccgcacccggcctacttacttttaaaatacatttacattaagaaaaaaagaatgtatgttcattgtagaaaatattacaaagttaaagcaagtaagaaacaaaattatctacaacccatcctatccaaagataattatcattagctattggtgtatttcttgcctaaatatatgtactatacatagacatagtccacagtataaataaactctgtggattgcttttttaatttcactgtagaaatattttaattgttgttaggatatgtatagatttgtaattttttttaaccatctggtcattttagtattgagatggtttgaggaaagaggacattagaaaaaaaaaaaaaacctgtgtactgggaattacagatctgaaattgtcatatacaccacatttgcaaaattttttcacctgcccttgaaaaaaaccaaggcatgattttgaattttataagatggtctattaagattgctgaaacttggagtgctttctggcaaaaccagcaattaaatgaagagaaacagaagccatcactagaagagcaactattttgtggcagttacttgtttcactatctcttccctgttctttaccccaacatagttcataacttaaagttgtggactttaaagcactctaaggcttttaaacttctgcctagtgagttagtattaagaaatttaagtcagtgccatggggttaaatatgaggtttaataaaaatattggtttcttaattttgtttattagtcttactcctatagtctgtgtgtcgtgaagcataatttctcttttctttctcctgatgcaactcagccactccaggattttctcattttccttcatattatgaatatgtaaaaattaaaacaaataccttttcttttagtcattgcatagttggactacacttatttcactctgaggtgatagggctcttcttttctatgtctttgcatcttaaatacatacagacattatgcatttatttatacttatatactaatacaacaggtcagcacagtcactcctcacccatgtggggagccaaaattctagtctgaaaattgagcatcaaatactaataagtaacttatactgaactcttaggtatgtttacattcttaatttaatcttctgacattttacagttgaggaaatttgtggcttagagaagttaaattaccttgcccaaggtcacttggtcttctaggtaacaactagagttcaaacctaggctgactgcagagcctaccttttcaggtgggattcagtaccaccaagtagcactttctgaactgtgttctatgaaccaaggtgtattatcaggcattactttaaacaggggttttgggccagtaaggttgataagtgttgcatattgtatcaccccctcagagatttcacggcatacattggtacgttaaaagctttgaaaagtactatagaaaagaaacttcagcattttagcatatctttcacaaactgacctggtcactgatccagtttttaaagaacatccagttttctttaaagaactttagtgtcctgagagaagagaaagcgctgtggacagatggacctgtcttcaggggaggaatctggctgcctctgctcgctgaattctgccttgaggccttcctttcatgttcatgtgcagcatggtatcatccagctgtgtaaatcttaccatccttcaagatcagttcaggatctacctgttctctgaagattttcctgaccacttgagtccataccgatatatctgacctcagcaaagttcctgattatgattgatggtaatgctctttagcacgtggctgtttccccagttggttcctaaactcctcaaaagcagacacaccctactttatattattcccctgtccgctgctgagtagcccctggccttactgccctcgagggagaggttaaagtgttccagtggtttttgtttggtttacaaatactcttcgtctccctggtcttgaaccccggttgagacctgcagttcattctcaatcctcaaacttgaggtgctcatgtgatcatcttacactcatatcagcacttatgctccccatattgttttccatctgaacacctctcactgatcttgcggttatttatcaaaaaagatttctgtttacagtgtatttcacaattaaaaattctactgatagttaaaataggtttcctagaacaacccctgcttggcagtcacctccatcttgctacattgccacagagcctgatgaatctgctaagtatttatgtttaggaatttcttttatgcaggaaaccccaacgttaagtggttccttgactccagttatgagtcaaatggttttaagtataacccatattagatttctattcatacagaaatagatgtccagtgtatgaattatgtttcagttatcggaaactcatttcatatcatggaaatatcaaaatagttcctccaaatcaaatatacttccaagaacattttgcaagcactagagccatattgtgtctattagttggataaatttttctgcataggcaagattgaatgaagtgctttaaaattaaattagtctaataaaagtatgcaccgaaaacaccaccttttcttttggcaactccctgcagtagtcatggatattcttcccttgctccgagggaattctgtgtacaaaattaacattatctatcttcaacatttttactccatattcagtgttcatgaatggctctggaagtctttgaatggtacctgctgggaaacattatttctaccactatcccaatcttatggaaatacatgaaggctgaacaatagattcaactctcagttgattctgttgactctgtgtgaactttaagggatagtaaatatttgaagtttatgttaattaaaatatagatttggctactataacagcaatccaaaatgttagtttttttttttttctcttacataaatacccaaactgataatggcaaaatagacttcatagtcttttatggtactgttagggatccatgccccttctctcttgttactctgtcattcctggagagttgctttagacttcatagtcttttatggtactgttagggatccatgcccttctctcttgttactctgtcattcctggagagttgctttcatctacgtggtctgagattttactaccatgtccacattgcagcagtaggaaggaaggaaacagaagggatttgcttcttcacctgtacgtgtcactttcagtatctttattctaggtagccatgtgcatagctaaaaatggttttagtgagtgggtaactaatgagatagaaagggagaaaggatattgggaggaatcgtagtctttgctacaaggtaataccgtataattttttaaatgataaagttgtataagtaagggtcaaaagtcacttgtagctaactttcattagttccaccttttccttgcctagcacagttagcatggtcttggtatctagtgtaaatctgatcttatccaaacatgaatttgttactttttatattacttggttaactgttgatttcaagtctcttttcagacttgtctcccaagttcacatgaatagggccaggctttaagttttttttaatgcgttcattattaccaagcagtgctttttaacactagtgttcagtaagtttattgaacattgggttatgatgatttattgaaattctacatttattgctttgcttggttgttaatagagtcaatgtctcttgtcttttttctgccaactggaataatccctactccacgtatgtgagctatatcctgtatcagaaatgtagaggaggcgtggaattggcaaagatttgttaccaaaaatcactatcagaccccattgctgttggcagtcagggaaccatggaaaagattatgggtcatggaaggttataagcaaaagtctgtggatttgcatagcagcattgagaggtaggtcttacaatgggcaggttgtattggaggactgaaaaaaaaaaaatggaaatattaaggaaacacacagatagtgattccaagaagaactagcaccaatagggctaaggcaataaaaggaagaggttgggattatcaaaatttggaagctcacaaaagcgcctggcaagttggggttcagatctctggggatgggatggggggggtacttggctggctggctgcctgttgtgtctctagaaaataatggggctggtttggggagtaggagtaggcttgaataaatgctgagaccactccaattactatggtgagttgcctttaagcagcgagcaaaaggatgtaagtctcttccgccagcccttctgcttctgtctagtgtcccctgtttggtaaatcctaatgggaaggctgttggcaagaaatttttgctaagttctagagccagattcacaaagcaaaatatagaaaggtgggtttggaactgaaagataataatcactggcacagtagtggatataaagtcttcctttggcaagttcagctggaagatattgtgccaaacagtactgtgacagaaattagagatggatctgggccagatggtatgtacaagattgagtagaagagtggtctgctcagtcttgaggagtgtcttgcacatataccaaagtcacttttacgtgagaaagcatgctttctattgcagtctagagtttcctttctttccttagaaatccgttgtgaatctattattcatgagtttccatgaccctttgttgaatttgtttgtttttagtttctgtgactcatcgaaaaactacttagtggatttttttaggtgtcttttgttatactggactttgaggagagaaaggtaactaagatataatctctgttctcaggtaagccacaccctggtttgtggtagaaggtgaatgtgaagacactaacattgtatgttaaatattaaaataaaatgaatcatacctgggaagtggaaaagggcaagtctggagaattaacttcgtgcttgtctttcaaagtaggactttgtcaggctgagggagaagtgtgtggagaagtgtgtggtgggtgaggacagcaagtagaaaacacatatttaaagggcatggagaaataattgttaagatgacatgtgctgtatatttaccagttactatataaagaagcgttattcctttgccctgaaatctttctttttttggcttcaaggggtcctccttgtttcagaattttgtatttgatatataccctccccctgtccattatgatttttctgtacttcagccatattgctgagatattcaactttataagcaacaagttcctttaaaaaaaaatacctttgtcttcaaactgaaagccgtctcatccctgtttttatataagttgccctttgcagaacaatttgtagtttctgtatgtggatcctccctacttctgaaaggttgtctggagaggtatcagaatcaccaaacaatgaaagatgcccaagctgccatgccaccagaagggggcatgtctcattcatatgtacactcgagttcttgaattatcatcgttgccttgaaaggctgtagaagtaaattattgggaaaccatcagaatgcacctgcctgagcctttctccctcagtcttcctgtttgtgttcagtggttaatattatcctctccacgtataaaatttgaattcagcaggaccttgtaagacacatgcgtttcattttaagctacatcccattctcagttctctgtccctatccatgggtgggaaggttcaaccctgttccatggacatagctgatgggacaggagtatccaagctaggtcaactgtattctctctcctgggatttttgaatcatgtggtgttgtccactaaagacggcacagagttggttggtaggcatagtaccagggtcagctccttatgcatcagtcacataccaggcaaagttatgggggaggaaaacctaaaaggtttgccaaggaagccagtctatagagaaaggagtgaagtagattttcactttctttccagaaaaagagataaaagaaagatgatatggacagggacaaacagacaaaaaggctcggcctctgcctctgcctaaggaccttctaatattaccatgagacgtgcctgttcttcctgctgattaggttgtgatataggcctgaatccttataacaaacactattttatttaagctagcttaaattggttttggtaacttgtacataaatcattctagagtaacatacactccttacagaaataatctcctgctttaccctaaaggaatttactattatggaaaattcacatggaagccaggaagggagatttttgagcaggaccctcaaatcacatacatgaagtttctgcctagcccttgtgtctcatctgtcttttctctcccctcaccccaactttattttttttaaaggcgttacattcacagaagacaaagcatgtttttgtataaccgtaaaattatttttctataattttttaaagtgatacttagctttttgttgatcttttttgacaataaaataatcatcaactgtgatatatagtatgaaatttgaagaaatttctgtgtaaataagtgataaagcagaaggcagcaaacaagaaaaaggcatttaccaacctcccaaataatgagtagtgtgttagctttgattacaatcccaaaactagtttttttgggtggttaaggttttcatttttaatatcctttctaaagaatatgaaattaatgaatttgaaataaatctgttattagggaggcatccgagtggcttataaaatagatgattttaccaaaaactattgttttttttaaaaggaggctaaatatattcggttgttgacaatactaattattgctttacttatgatgtagttactgtaaattttattcatatgctatgtagttatagtgaaagcaattagactttagttttcaattttcctatttgtaaatggatttaaagtctttttgatagtctaggaaccaattaaatatttctttaatggctcaactaattgctttataactattacttattttaaagtgtttgcttagggtacagagagttaaaagcattaagagataatagtaggcttaggagactaaggatgtaaactaattggggttcttattgtcagatttaatataacatgttaacatacagcatttatacagaggcattctttgtacatgccttaggttgtttaaaagggcaatttaaatttaaagaaggcaatttacttatcatctcggaaattctgtcttgttgccctagggctagtatgcaccatattgcatttaaaaaaatgtttggaaagctgttggaaactttttgtcaacacgtccacatttgcagtaatattctgtggctttgaatgtaaatttaggaatttatcatgttcacaaataaaggagagatgaagtttactaataataaaatgaaactgataatcagttttgaatctaagcagttgtttcagaggcggtttcatgtgagtctttgattaggattttgccttataggagataaatttatttatttattagttttttttatgttatattttgagttctagggtacatgtgcacaacgtgcaggtttgttacatatgtatgcatgtgccatgttggtgtgctgcacccattaactcgtcatttacattaggtatatctcctaatgctttccctccccgcttcccccaccccacaacaggccccggtgtgtgatgttccccttcctaggagataaatttaatctggttttcagccatagtagcattcagactgaatcctgaaaatgtcctctccactttttgctgctgttgaagagatcagtgaagggttttgtaaacctgaaaactctggcttagattttcttagctaaatttctacttagaatcagtgagtaagtgacatatgttaattttcagtgctagtttaataataactttttcataagatttggtttcacacacacataaagtctttataaagccatttgtttcctttaatttcaagacccaaaatattaatttggaattaatattgagtgttttgctcctgatgaagtgtccttaaacaagtctgtcatattgtttgaacttttatttctacttcctcatcttcaagtatttgtgactatttctcatgttgctaaatttagttatttctgaaaaagtaccaaatgacctataaacgcaggaagaacagtcttccaaagcctgaagggggctctgagtgactgactggctctgggcctaggctactttgaagtgcaattcacgtttgaaacagttctcggagtctaatgcccttccattcagaagacctgtaaatgcttgagttgtttctccatcttctctaaagaaaacctgactgtgtaatttctctaggatcttagggtcatgctgcaaaggaacaaaggtgacattaaaaaacactgtacttcctagttgccaataatacctgagtataaccccaaaacatatttcttctctaggaacactagatcctgaaggtaatctctcaaagtaggagcagagttgtccttacctggctaatcttcttggacaatctgtgattactgtcaagaacttctgttccattccatgcttacagtgaaatcagataagatgatgacttccatgagacaggtaaaggaatttacacttggtttactcagatgcatagtctcttagttaagacagtagatctggcatttgggatttaatagtgaggacaaagagagtgcacacacatatcactatgtggtttctattaacaatttaaaacctaaaactaaaacatgcctcttattaatgttgtacagtcaaaagaatagctgccttcaagttaacatggacatgactaataacttcagctgcttactttacttgctttcagatgtggaagagatacttactcgcaaattcctaattaataggggaaaaaaatctaacagttggacaatacaaaattacataacaattttctagttcatattttaatacagaagggagttttaagttggaatttttttttttttttgagacagagtctcgctctgtcgcccaggctggagtgcaatggcacaatcttggctcactgcaacctccacctcctaggttcaagtcattctcttgcctcagcctcccaagtagctgggattacaggcgcctgccaccatgcctggctaatttttgtatttttaatagagacggggtttcgctatgttggccaggctggtctcaaactcctgacctcaggtgatctacccgcctcagcatcccaaagtgctgggattacaggtgtgagccaccaagcccggcccagaatgtattttaagctgtttaaaatggaagcattttatatattctataagaccttctaaaaagaacttggaatttggagcagggataaggcactgttatttggtaacgtgaagttttttttcttcaacttttaagttccgggttgcatgtgcaggatgtacaggtttgttatataggtaaacgtgtgccatggtggtttgctgcacatatcaacccatcacctaggtattaagcccagcattcattagctattcttcctgatgctttccctgtccccacagacaggccccagtgtgcgttgttacccaccatgcgtccatgtgttctcatcattcagctcccacttataaatgacaacatgtgatgtttggttttctgggtaacatgaagatgttgttgtcatgaaaacaggtttgatgactatagtgtaatagtgtaataagggcctaacctcagagacactttcacatttggatttttctttgcttcctagatgttatctttattcctgttgcttaaagaaccagtttaatgcatatagaatttgggttctttgcccagacacccagaggtacatttgataggtacctgattcagagaaggtgaaaattttagattctctatctctctctctcccttttttttttttttttttttgacaggtaaacagaagtaactatcatttggggttgtcaagatatgggtagtagatacctaattccatgaatgccttctctgtgcaagtgctggaaagtaacctcagacttccagactcatcactgagattctttttcttaagcaaaatagtgacgctctgcaggatttctataactgaagttctctaaaagataaatttatattgcattaagagggtagagggtagtatttagagctatgctctcttaaaaagagtaaagaaatttcatgtatatgaaggaacagaaagcatggggataagttttatacaccctagagtggacttttatgataaaaagtaatttacttgttaatcaatttaattcagcaatgggaaaagatctttctcttctttctgaaatcttacacagtgaagggatgaaaatggttatactattggtaatcagagatgttcctattttgttttgatgtgtagattccgtagtacctagtgttgttggatattaagaaaaattctaatccctgttcttgtgggaattgcacaaggagcaatgtaaacacaggtagtggaggtagagatgtgctgtcgtctacttctgctctaacttgagcagccacatctcactcagggtcatcccataggatgtccaggctgtggttggagagaagtggggggatgaagacgtggggtgcaataatgggaggaggatgggctttgggaccagaaggttgtgaatttgagttctggtccatcttcttggcagctgggtcgattagggtggtgaattagctggctgaattacttcacacatcagagcctcactttcctggtttgtaaaatgcagattgtgcccctctcccagggctgccatgagggttagggaggccaggaattaaaacatgtaaaccatgcattacactgcatttcaacccctgcaagggtgatgcagctagctttacctgattttacttggattgtttcttttttttttttgagacggagtctcgctctgtcacccaggctggagtgcagtggtgtgatctcggttcactgcaagctccaccttccgggttcacgccattctcccgcctcagcctcccaagtagctgggactacaggtgcccgccaccatgcctggctaatttttttttttttttgtatttttagtagagacggagtttcaccgtgttagccaggatagtctcgatctcctgacctcatgatccgcctgcctcggtctcccaaggtgctgggattacaggcgtgagccaccgcgcccggcctggattgtttctttagtgaagaaaagactggggagaagggcacttcttaaagcaatgtcaacagcctctcatatagttaatacatctctatgtggcccttcccagagtgtccttctgtgaggagatccattacaaatacaaaaaattcatgtggccagataagttctatgaccagataagtctggcaaaagctgtttattatacctgcctcttaaagattcacaaggctgaaaagtcctgaaggaatgtaactttctctaacccagaatttcacaaacttatatgaaaacaaaatctttatttagtatgataacctattggcatcaattcatatattatttcagtaaatgttggagactttctgtgtgccacagacaccttcacaggctgcttcagcgaggactgggggagggagagagagatgagtaaaaagattgaaatgatgattccagatcatgagggatacgttgaatataataaatcagtgtgggtattctgggtgagaagtgagagctatttcagatcagatggtcataaaaggcctcttgaagaggtgatatttgagctggaatctgaataattcaagttaactggccttgcaaaaatcttggagggtagaaccttctaggcagagataaaagcaaaggaattagtgttcttgagagcacactttgaggaaagctgttgcaataagagcaaagagcatgtataagaagtatttcaatcaaatttttatatacaaaatatgtagtaaatctttttcgagcattatgtgctagatactatgtgccacagacacagagatgacagttacatttaaagagtagagtagttcggagaagaaagactcaacatctaggggattgagtgataagttgcatggtggaggtagcatgttgtagtggctgaggttagagccagactgcccaagttcaggtcctagatccgccacttacttgataaccttgggcaagctactgacatctgcatgcgaacactggggacattcctagtgcctctcagtggattgttagtatatgcaaagttgttaggacagtgcctggaacataaggaccacatgctaaaattgaagatgatgatgttagagatattcccgtcataaccatcatcgttacagttgtcatcactgtaatcttttagtgccatggtccagctcagatgcctgagtcttcatgccctcctaatgggccccaggtttgcccatcagagtcttacacatgatcacccacaccatgtaggcactattcttacccagcaaagagattaaaacttgcttcatctgttttctacccaatttaactttgttaaccaccctcttaaaaagaagtttcttgaggatttatctctggttgtcttccagtttgggcggcgggtggtgggtggtgatagttggtaatagggttgaggtaggatggaataaatcagaatctgcaatgaaccacttgctggataattagggtagatgagaaccacaggactgtaataaaaatggattatcataacgatgaccctacggtgctaaatgatgcaccatgttccttttgaatcaacaaaagttaaagtcttcctggaatagttttagtacattattgatctctaattcttagaaaattggcaatccatgtatagaataagaaagtctctattgctgcaaatattcataacctgaagaacccattccctaaccattttagataaataagatttttataaaattaaagcaattattaaaattctatttgtgcatggaagaagccatttagctaaccaattatatatctaacttctgtaacagcacttcggaattaatctaattgcatcctattgaaagtcagtcaccttttgcaacatgacaattttatgccaagagaatgaaaatgtcaggtatttccattacagagagtcacattttcccttgattgtttcaggcagaaagaaagcgactcagattaatctgtttagaactattttcagttatctgtatatgtcatacatgctgtcatgttctaagaccactttgttcttggatactgctttccaaaatctatgggattctactcttaaaaaaaaaaaagaatatctcgctttacatatcattttattctggggaagcctaattagcacattaatatcagagagctgacaacctcctacatgttattttaggattccatgtgcaagaccatattattctagttatttgaatggcacgtattctccacagcttgctaacagtagttttgtcttttaaaatttatgtgtttccagtgtttagggtctgctaaggagtgggaggtgaatgtgtcatcataaagaatgttgcagcaaatatattttgcaggatacagccatttccattttttgtagtacaaagatcctatcatcctgaaatcttacattgtagattgtgttatgtgctgctttttatttcagtgagatgaaagtaatattctgaatgagaaaagaattagagtagcatttctcaaatgccagttttgaacctaagtttaaaatagagagatttatcactgaaaagattaagagaaaagaaagaacatttatggaatagggattacactaggtattttcatagaggtatttaattcttgcagtcaaccttcaagatctgtgagatttatccatcacaaataaatgtgttcagattaagtatgtggcctagcaattttgtaaattactgttttttactttgcatttaacatttatgtaattccaagccaatattttgaacctacttttaacagttacataagaccttttagaatgaattttgtatttatcttttttctcctgattttctggccttcatttttctgccaaatattttaaaaaatagtgttttactgtatgtttttagataagccacctcatgccattcttgatataagttgtggttattaaattaatttaataaattaactaattataaacttggccaaagtcacacaggtaagaaatggtaggtccaaatatataaacctaaatatgataaatttccaagtacttgctgttctctttgcaccttgctgccttatggaatcaaggtaaaaataaagaaaaaaatgtaagtgctttgaaagggttcacagctatttgtataactagaatataatctattttgagcaaagagaattgggttatatatcttatttctagattgggccaaaccagtaagtcattttcggtttacaggattcaaatcaacattgtattaacattaatgaaaatgccaactcccattcagagcagatgagcaacaggtgatatcagagaggacctcttagaaaaagcaccttttttttctagtaactgctgattgtgtcctacaaccttctgtgttaattagcttgaagtgcctcaataatgcatcggccaggttgcccagaaccctgcaaacatcttttcatcatccctcatgttgtgggctttccttaataggaaggcagataacttcagatctttatgtctcttagattttatagttttgaaaaagtgacaagtctttttgtcaatagatgcctgggtcttcttatacttctgaagagaggaaaatcaatccaaaagaaaacacaatagattctaattttatggactgttcattaggaagtctggttttgcttaagacaactgtgctggtctagaagttcatagtatttattgatttttcttctttctgatgatcattattgctattttgtagcaatattgatattgtataatataaattctttttattttgctaaagggaagtgcttctgtattcttgaaaactgagaatcaaacagtatttaaagtactttttctggtttatccccagtgtctgtcatagggcatagctctaaagaagttcactcagatatcaagggtgaatgaaaattctctgaaagagaagtacaaattattgtgggtccaactctttaccatacattatagaaggcagagaaaccatgaccacctaaacttgtaggacactgtggggagaagagcctatgaagttgattcctaatgtaggtctgcagtggccatggagctgagaaatcaccgaaatggggaggaggaggagggatctgtctgcctaacttcagtaatattattgccttttcttagataaccctcttcactcttttctgtctcctcaatccttatctagctgtcaaagtctcgttcaaatcctgcctcctccaggaaatcttatctgctcactacaactcaaactgatttgttgacctggccatttacagcatttgtttgaccataccacctggcccttaaggctgcctggcgttttctaataaaagctatcatttttctgaatacagactatttgcttgcttttatttcttagcagctccatgagatacatactatcattgtcccaaatttatattgtctgtctctcccttcacatctattaatatttgctttatgtatttaggtgtgctaatgttaagtgcatatatatttataattattctcttgatgaactgtatcctatactactatataatgaccttctttatctcattttacagtacttaaagtatattttatctgatacaaatatagctaccctgaaagtatagctctcttttgatttcaattttcatggatttttttttttttcatttctttactttccgtctatgtgtccttacaggtgaagcgaatctgttatggacagcaatagttaggtcttgttttttttttgagacggagtctcgctctgtcacccaagctggagtgcagtggcgcaatctaggctctgcaagctccgcctcctgggttgacaccattctcccacctcagcctcctaagtagctgggactacaggcgcccgccaccacgcccagctaattttttgtgtttttagtagagacggagtttcaccgttagccagaatggtctcgatctcctgactttgtgatcctcccgcctcggcctcccaaagtgccgggattacaggcgtgagccaccgtgcccagccaggtcttgtttttttatccattcaaccactgtgtattttttgagtggagaatttaatccatttacattcaaagtaattattgacaggtaaggacttattattgccattatgttcactacttcctggttgctttataaatccttcattctgctcttctctcttgctatcttttttatgattaggtgattttctctgctgctatgccttgattccttatgatttaaattttgagtatcctccttaggttttctttgtggttaccgttaggtttatatacaacatcatctagttataacaggctattttaagttgataacaactcagattgcattaaaaaactacacttttgctctacttcctcccacattttacgcttttgatgccacaatttatatttttatattgtgtatcaacaaattacattgtagctattatttaaataatttatattttaaccttcatactaaagtataagtgatgtatacaccactatcacagtattattctgaatttgactgtgtacttttaccagtaagttttatgctttcatatgttttcatattactaattagcatccttttctttcagcttgaagaactccctttactatttcttataagacaagactagtggtgattaactccctcagcttttgtttgtctgggcaagtcttttatctctccttaattctgaagcacagcttagccaggtacagtattcttggttggtgatttttttctctttcagcactctgaatgtatcatctcactctctcctggcctgtaaggtttctgctgagaagtctactgccagtctttctggaactcccttatatgttatttgcttcttttctcctgctttcatgatcctctttttgtctttgatttttgacagtttgattatagtatgtcttggtgtagtcttgtttggattgaatctgagtgtagattgttggccttcctgtacctggatatttatatctttccctagatttggaaagttttctgcttttacttctttaaataagcttactgagcctttgactctcttcttcaattcagttcaaatatttgctgttttgatgctgtcccataaatcccagaaacttcctttgttccttttcttttttctcctctgtatattttcaaataacctgcctttaatgttacagatttttacttctgcttgagcagttctgctgctgatgctctctattgcatttttcatttaactcattgtatatttcagcttcagaatatttgtttgaattttaaaagatactttcattttttctgttgtttctcattttgatcatttattgttttcttgactttattgaattatttctctgcatttaagtttccttaaaacaattattttgaattctgtgtcagacagttcatatatctccattttggcagggggcagctcctaggagatcttttgtgttcttttggtggtattatgtctctttgtttttcatgttttttgttgctttatgttaataatctgtgcatttgaagaagtaaggacttattccagactttgcatactgggattttctggggaagcctttcaccagtcagctcatccagagatccagagattctgagcaggtcatctggtgtggtcctctggcagacttactactggagcccttggactttgtgcctggatcagcaggtgggtgggcctggtacctgggtctctgggtctgtcgggttggacctggagccttggatcccctgttcattggatctgtaagggtaggtctggagcccgtatcctcagaggttgatctgaagcctggggggctgacctggtcctggggtaggtcttgagtgtgaccttgagaggctgaccacgtactgggatgggcctggtacccaagtctgcagggttggtcctggggtaggtcttgagtgtgagtctacagaggctgaccacgtactgggatgggcctggtacctaagtctgcagggttggtcctggagccttggttcatgggtccagcttgtcagcagggtctgctgggctgggcctggaccctgggtctgctggagcatggggctgcagggactttattctgttcttctctcttgctgtcttttttttatgattaggtggttttctctagtggtatgctttgatttcttactgcagggaccagattggcactgggaaatcttgaagcctatgtccagagttgccagcctggtgcctcagacccagtccaatgacaggttagccagctgaatgacagacccatcccctgtcactgggctgggtctgaagtctggggctgtggtctgaagtctggggctgtgtagggcaatctggccctgggatggtctgaaacccggggtggaacctggggtcatagaggctggcctggtgctgggtggcatggagcctatacctgcagaggctggcctcatgactagggctgcagggccagcttggtagcttgggtgggcatgaagtctggggctaatggggctgttggggttggcctggtggtggggcaggtccagagacagcctgccaggctagcctagagcctggggctgcaggatcctgcctggtgctgggaaagactcggaggctcagtccacagatagttaccatcctggaacctggaacctggaacctcaggggctggcctggcactgggtgggcctggagcctgtatctgcagtcaggaagcagggtctgcaggtgcaagcctgatgacaggctgcaggggatagcctggtgctggcttttattgaggcaagcttcattttgccggcagatccaaagcaaagtctagtgcttatttctctctccttcccccatactgaggataccttgctttaagctgtgctgcctggggttgggagtggggtgatgcaagtgatgtcaaactgtccttcctaccttcttcaatgctacatccaggtgctgtaatctctcacttggtttccttagttcttgtgaaaggtgtttttctatgtggatggtagttcagattgatatttctcttgggtgggggtgatgtgtactggaaagtcctattcctccatttctttatatctgtctcaaattgtcccagatttacagatgaagaaactaaagttcagcaaacttgaatatcttgccaatgacacaaaactatttagtagagccaaggttcaaacttcagtctttgtgaattcagaggttgcttgcttccactgtgcagatgtggaatatcaaactagtctttagattctgcgagatttttctttctctcttatgttctaagaaatgggaggtagaaaagaacagtgatgggtgagggagaactgtccttgagtctgcaccctccacaggaattttgttgctggggaaggttggggaggggctgtggagagagggtccttagtgcccagctgaaagtatttttcccactggagtggttccagatttaccaaactgccatgaaacttgcaaccaaggtgtgacactacccctggctacaattgtctaccgttgccaggcctttggaaactgctgcttttgccaccagggcctttgtgcaaaagggcactttgctttctgtccctgtggccatcaccagcttcccattgatagctcctgtctataactgttggggtttaccatccaacaagcggactctatatcagctctcttcacctgtgttgtcttgtatgttgctgtgtgtctaaggtgtgataatttgccctttcttcacttgtttttcatagctgtctaatttatattgttttgagtaccaggactgtgcagtgggctccagaactttctccaaagggaatctgttgccatttaactggggctgttctagtgtgtgctacccaagaatgcccctttatatgctttttaaaaatcttaattcaaaaatacattttttgtgaaaaatacaaaaaagaataaaataattaccacccaaagacaacttgctaaatttagtatatattattccaacattttctacatttatgtatatatattacataaagaaaacatactttttaagtaaaatggcttgttttgtacctatagcttagtgtcctgactttctctcgaaaccatctttcataccattaaatattttccatatcgtttagtagtaaaattgttcagctaatcctctattaaggttgtttctcacctctctgatgttgtaaacagttctgtggtaagagttgatgtagctaattctttgtgcaccttcttaaatattgtacttttctcccctttctggtttattttttaagtaatatgtataaatgagggaagtaactaagttgctctccctactgatccacagggtcatgatttctttagggtacatttctagtattttaattgttggatcaaaaagtatgcaaaattttaagtcatttgcattttagaaaggttatgtaagtttactcttttaccaataactgaacacctttgtggacaatggatattttcatttcagattttgtcaacttcataggtgaaaaacgaatctcatttttttaacttatatttttaaattgctagtgaagttgaacgtcttttttatttacaaattggtcatttggatgtttcttattttgtaaattgcctgtttgttttttcctgttttttaccattgatgtgtttatgtgttcctattgatttgtaagagttctctaggggaggggacttggatttaagaatattaacaatttgggtgtcataaatattagttactccccccagttgttttgtttttattttatttgtgatattttaaaatattattcaaggttacaaaagatgtaatagttaaaaatgaaaagtataatcatgctgttttcttattttctacctaacagcattagaaaatatacaattctttatatttttgttttagcaatagaaaatttctatgcacttcttgatagaaaagatgtgaatttgacttaccctttcccatttgcctcttatcctattaatatttgatattttaaaaattctggttatttatccttatgacttgaagtaactcacctaattctattttgtactccattatcattcagcggcatctcttgactgtctactttataaaatgagaatattagcacctttatcccttcttaccccctcctccgcacccgcagactgagcccagagcatttccaggagtttcttcttcctccataatctacacaggacaggctttcatctccactgcagctctttcgctggttcatctcccagctggctctcatctgcttcctgtcgttccagcccgtctcttccctgttacaagttatcctccttgtacctccgtctttttatttaaatggttctctaaagatgaaaggcaaatgtgcctagcttgccatcttgagctgaacattgcagtgctttgtatatatagaaattttaaaatttttatgtggtgaaacctgcaagtgattccttttggtttccacctttgccgccatgtttagaaagtctttctccaatttaagattatgttttctttagtacttttgtgaattacttcttactttgaaatctttgttcatttctagaatttattttggtgggtagaatagtttagagattcatcttttgttcaaatggttagccaactactcagtatcatttattaaataatacaaagttttgaagtactgaattcttacatatatttgtgcccgttgctgagctttgcttctttaacctgtctctgatgcacactggtgccaaacttttaattattgccatttcagaattttaatatctggagggcaggtcttcaccaccatcccccgacatcattgttctttatcaaaatgtttttagctgatgttgtattctctcttccctgctgcaaaaggagtttactgtagtatacacgtttgaatgaggctgccttggtcagcccacgtcttagctcttcgtcagtatttctttctagctaggcagaaagagtaaaacttctgtgtaatactagttccctgttccacccaggttttgtattcacttgcttttaggtctaggactggagaatgcagtacatgccaataattctagtcttctctgatctgtgaacatataccttcactgacatttgtgtagttacttggagccaaaaggaaaattgtcacttagccagatttcactctcaacatttcacgtctccttccactacctgacacctgctagtacctcccagtcacccaatctgatctcctaatctctggcatctgacccagcctccatcactgcctccctcaggaatgtgtagatggccttcaggccatttcgtcaggctccctctttcccaccctacctgccagtctatccttcgcctgcctgccttcctttccgggtgccagcacaaagtttgtgacctcaggtgcctttgtgctcaggcagaattaggcacctagcaatttacgaaacactcatggctgggtgcagtggctgacgcctgtaattgcaacactttgggaggccgaggcaggtggatcacgaggtcaggagttccagaccagcctgagcaacatggtgaaaccccgtctctactaaaaatacaaaaattagctgggggtagaggtgcgtgcctatactcccagctactcaggaagccgaggcaggagaaatcgcttgaacccgggaggccgaggttgcagtgacctgagatcgtgccactgcactccagcctgggcaacagagcgagactccgtctcaaaaaaagaaaaaaaaaaaaagaaatacttatttaattatgcttacctagaaacattgcagcatcaacataactggctccagccagaagaatgagtacttgtttcctggcgggaaggatgccaagaaacctatgcttcggagtctctgtgggcacagagcctgtgtttgaggcagatggaatttcatccgtcggaaatttaccgtcattgactctttcctaaacatacttagagctaactgaaaaatggtcacctttgcacttttgcacaaatctctatcaaaagccagggagaacagaaaatctcttttactacttttttattttcctttttttttggaaacagggtcttgctctgtcgcccaggctgaagtgagatggcgccattttggctcactgcagctgccgcctcccgagtcctagcgatccacctgcctcggcctcccaagcagctgggactacaggctaaatttttttttttgtagacacggggtttcaccacgttgcccaagctggtctggaactctgggctcaagcgatccgcccacctcggcctcgcagcgtactaggattgcaggggtgagccaccatgcctggcctactttttccttttacgtttgctgatttttgtcccatccttctttttgattctgcaacaaaaaaattaaaatgttaaatattaaatatcttttgtagaagatactttattaaaattctatttcagtgctatcaagtggaaaaataaatgcaagtcacatttataattgtaaattttctagtagccatattaaaaatagctttaaaaacccaggtgaaattaattttaacatttaagctagtgtattcaaaagaatgtatcagcgtgtaatcaatcttaaaaaatattgagatgccttacattcttttttttttccatttgatatctgatgtgtattttatacttccagtacatctcaatttgggccagccacatctcaagtactcaatagctacatatgaaatcactttacctccaaattctgagtgattttactagtgactttatattggaaataaccacatctagaagttcttatctagggatgcatgttcagaatcacctggaagctttttctaaatatgcattcctgcctgtaccctcactagatctgttaaggtaaaaatctctgctctgtgtgagcctgggcatgtgtgtcttgagaaaggtacataggtgatattgacaagtacatttaattaaaaaccactaagatgatccagcttcttcagtctacctatgactaaacacgtcctgtgtgatcaaacagctttcccacagagagtaatgatacagacctcagtcttccattcacaaatctggtgtcctttttgcctcatcatttctaacatataggataagaatgtagactaatattatacacagatttgttcaataacaagagtcagcaacaaaagggagtttcaagttactctttagattatcaggaaatttaatgtaaaatatcctacctgcacatgtgtgcacgagcacgtgtgcacacacacacacattgtctaaatagtcttgttaattgaagtttcattgtgatgggcatgaccgtgtagattttatatgcatttccatgttcttgataccttttagactcacctcatagattatacttttctgaaactgcttttaaaaatctatatcaaaatagataccaagggctattataattattttagtatatctctggacatcataaccaaatacaaaagttcttcagcctgtcagttttcaaagtgtcagctctggatttttcaggttaaaatttcatatctttaataacaaggctgccagatatcagcaggcagtgtggttgactactctgtaatttaatgggagttcttcataggtgagtcacagtggctttcttctctttctttcacatggtgctgacaaggacagcacacgtgctatactgaaagatagtaagtctcagaaaggtcatccaaaggtaatttgtggattatttttgatgagttggagatatggagaaaaatgtttgctctttaacacttaattttgtatgaagtgaccaaacttagattatctagttttatttcatgcaagtgaatttaacaattaaatattttcatagttctttaatccgtatgcttattaaaaatcaacttaagtctacaaaagtcacaagtaattaacaagcctgttaaataaaataatgatatccataatagcctacaaataactactagaatttttaaaaagcattttaaaggtccaaaacgtttaaacaggttatttagcagtaatcaggatggttatatgacactcacttgaaagaggcttcagtttagattatctagactaactgtctttttacaaatggaaaattcagagagatccaaagagatgaagggattaactccactcacatagagattcccttccagtgctagtttgccactgtcttctgactcacttcagttggctttttttttttttatcagctatgatgactttcttttgctagaatgtaatatcatgttaaggtatagtgatttgcttataataaaatgatttaaaatattttgacacatgtctattggacatatcaatacaacagaacaaagacaatagccccatgacttcagtgcttcagagttccatgtgtgtttccttccgtgtgtctaacataggacattaaagagcatgatcatttcttcaaaaataggttccttcaagctgagtacaagatccaaattttaaaaataccttttgtggaaaatactaaaacttggaaccacaaccttgtttctctcttttaacgtaattgctcacttcatgaaaaaaaaatcccctttggacaaatggatgtaattgtatatgtaatgcactgggaagtatgagttactattgattaacttgtattaaatatctgagaaaaaggtatgtattttatttgtaattttaagttgacgagatgataaatagaaaaccccttatttggagttccctgatgtattcttagtggtcaagacccttaaaacaaaaaatgtgatttctcgttttacattctcctcctttctagtttttttttccttcttatgcagaacagagattttattgtagaattaaaactgataaacctgatccctcagctctgtgctattttgtttaccccatgaggagttgctccccataaacctgagagtttgttagaaggtaccttgttcagaagattatcaggtttaagcaattgccattcaagagagtaaagaagaactagtctggaagctggcaagaaaaaaaaagttgttatttctaagtcaatgtttgtagaacaattgcctggttaggcaatgagacagtagtgtttaatacaattgagctgtggtgtataatatgagtagtcatacactcttttgtaagagtcttggattgatatttttgttatactttgcaatcaaataaaggaggctgtttgcacatatcctgaaaacgatttgataactatatagtgattatttctcggtaatttttgaaggtctactaaccaaaaaattctaataaaattcactcttatgaaattaaagattaagtcacaaaaatacaactgtttagataaatattcaagcactgacaggcatatagcacctcagttctgtttgtttgctggccattatgtttttaccagcttttgttttaaaagtctcatctttctccttgattaaattaaatgaacatcctttcctgttactccaaaggattccttataatttttttatagcacctttgattttagactgagggcttttagatagacttaaatagattcttctactgtatgtttctgaaatattggcccctgtactttaccaacatacatttcactttataaagttaatgtaagggcttttcagtgactccaggcaaacctcaaacaatctctgatttgcaaaaagatcaagatgcctctggaaataacacacaacccagtgttgttattattatttttttgcaagacctaactagagaagtgatcattatactgtatattctttaatcttgatgtttttaaagaagtttaagtgttgtatcctttaagcaattaagttcagttcaaaagacagaataaatacaaagctctttaaaaaaaaaaaaaacccttaagagaccacattgtggtaagtatttcagcctctggattttgataaactagaaagctttattttgaggagtcattaacttgcaatttggcccagatcactctgtaaggtcatggtagcttcagaccccttatctctaactagcctgcccgctgggacagaaagtgtgttccaagagaaagagcaagatctctatgattagattgagtctacaggggactgagagccctaagaaaacttcagattttaagaaatcttcaaagagaaaagagacttaacagatccagatgagccatgggaacagtgaagtgcttggtgcatgtatatataagttctcaatagagctgtttcaaccactagtccaaattcaacttctcaagcctggtagagtcaaatttctggcacttggcagcagagagtttatagaatgccttgatggaatcaagtagtaacctgtcttccttgtcttccttttgcttccaaacttatgacttggatttttttttttttttaatgctctttccagccctagtagtgacagcattttccaaaatgttactcaaaacctctcaaatagcagaggcagtaccaacacatcctggcatctagcctacggtcgtgcttcaggaatacactgactgccttggtgatggccaaatgccagttcttatagttaagttgtggcttggacatgtggacccattcctttctgtaatcctatcatgatcccctgctttctttcttccctaccagaatctaagctcctggaaagcaaatgctatgacttttatctcttgtattcccacagccatgttggctagaaatatggtggatacacaaagaaagttagttgaaagaacaaatccaactatccaagaggttctgaatacccactggccccaccaccaacctctgctcttcttcttcttttttttttttttttgatatggagtcttgttctgtcgcccaggctggagagcagtggtgtgatctcggctcactgcaatatccgtctcctggattcaagcgattctcctgcctctaccttccaagtagcagtgattacaggcgtgtgccaccatgcctggctactttttgtatttttagtagagacgggggttcaccatgttgcccaggctggtcttgaactcctgacctcaggtgatccgctgcctcggcctttcgaagtgctgggattgcaggtgtcagccaccatacccggcctgctgttctccttttaatgcacccaagtcctggggaacccgactggggatcagagctgtgagctgggggagggcccgttgttttgaccctaagacctagcctgacttgagaagtttcaggatgtggaatttcatcaggctcaaggaatcctttcaaggagcattctgacaatagaaccatataaaatccactcttctttttgtcaattattttgaaactgttccagtaattaagattgagctagaaaatatgaactacatttttacaaatactcagaccttcaaaacaggctttaaaaggccgggtgcagtggttcacgcccgtaatcccagcactttgggaggccaaggcggcagattgcttgagcccaggagttcgagaccagcctgggcaacatggtgaaaccccttctctctctaaaaataaaaaaataaaaataaagaaatcagccgggcatggcagcatgggcctgtagtcccagctacttgggaggctgaggtgggaggatggcttgagcctgaaaagcagatgttgcagtgagctgcgatcacacactccagcctgggtgacagagcaagactctgtctaaaaaaaagcccacaagctggctttaaagtgaactaataatgatgtctatgttatgattctatatgatatttgaatatgttcacccttttctcttttaatattgtttcaactactgatttactttagcaaacactttcttcattaaaagtgcaaaggtaaacttaaaccatccaaataatcagccaaatcagtcgaatctacatgaaatatacaacaatctaaatgcttaaaatagataagtacaatagtggagggcgtaatgtgttactgggcttttgacatcaaggacgtctgtgttcgaatcctgactttgtcagttgttagtaccagttgtattgacttagataaatcatttcacctttccaagtctcagtgttttcttttataaaaactatggttgtcaggaggattttgtgagataattatatatgaaagaacctactaggatgtattctttagtaaacattcagtatttggctctctatttggcaactgagtggtggttgtgttccccaggtgtgagggttcctgggctgggctggggctactgtcttgtagtttcagtaatttggtttcttgtgtactattcatatatatatatatatatatatttttttttttttttttttggagacggagtctcactcttgtcccccaggctggagtgcaatggcgcaatctcggctcactgcaacctctgcctcccagcttcaagtgattctcctgtctcagcctcccgagtagctgggactacaggtacctgccaccacgcctggctaatttttgtatttttagtagagacgaggtttcaccatgttggccaggctgatcttgaactcctgacctcgggtgatccgcctgcctcggcctcccaaagtgctgggattacaggtgtgagccaccatgcctggcccttattatatatttttatatactttagaaaatttgatctgcggaaaatctggttcttgttttttggccacattatcagatcagtcactcatctactgtaagtacattaaaaagaatacatggtcactttgcccagttaaccagagaatggtgccattaagttaaaaaatgcatatacatgtataggcatgatcctcatatagattagttttgttagctgcacagtcacagatcaaatcctgagttattacccttcttacagaagggtgtgtcgcttgttcatggtggggacaaggttgtcagtgaggatagcttgatagtaataaactattactaccattggaagaacatttcaaaatacaatattatgcatcctacttaggttattttcacttcatatggtaatagtccattaatttaccctaataatatttagtagattttgacatctactagaacataaggttgaagtgaaaagcatgttttagtttgtgcattttaaaacaattttctacgaaagaaaaccaaaattaccttccatagctttcttatttaaattggacttaatatttctattgtttttaagattcaactcttggaatcttctacatttctttgcctaagtaataggggatggtttatgttttttgccattcataatttttcttaaaccttcatacccacatttagccatatgcgctttaagacacacagtgaagatgaaatttaatacacatcaaacttctgtgcagacttggtgagaaacagatattttgcagcctgctttcactctgtgagtcattaaggagtgggttgataaacttgcattgcaaccttgcttatagaagattgtgcctattgtaagatactccctataaagccaaaagataaaaaaatgctaagggtactgacaattgtttataaaatacagtcataaagacatcccgctccagagagttctctgattaaacttcacaataactgtaatttctctgcctgaatcactttgttaaattttgtcttggcttctggagacagggtagggagacagattaaatttcaataccttatgctattcattgggcttgggagagtttcttcagcataaatgataataaagatagattagtgattctggtttatcctctaatcttagcatagacattttctgtagattagaagtcatttcatttatgaaccaaataaggcttctgatataaaaagaaaaatgaatcttactcagttccctaaggcttagaaaagattgctggaatttaggagttgggtaaatggttttactttagctactaatccaattgaaaaaacgtgagacgattttctgaaaagctaaaaagctcttatagtaaatttgagaggatttttaaattatggagaacaagatagtattgcccttacctaaaattctccctcaatattttgtttcctttgctttggaaacagcatccaagcagggccactgagaagggtgtgtgggggtgggtgttttattgacagttgtttgaaggaaattatgcacaggtacctaaaaagagcaactcaggcaagtttcccagccacttagatttcctgtttctttaagttaagcattgctattcacattgtgttgactgtagaaggattgatagtgtccagtacaaataataatagtaaaatagaatttctgcttagagtttgtggtaaatatcaaaatatcttagtgataagcacatgtattcttttaaattttgtcagttgcccagtgcttccattcattcatcacttgtttattttattcaaccagcatttattgaccccctgctggttctgggtttcctctcatactgtgctagatgcctggtatgcaaagataaatgagtcatggtctctcccctcaagcagtcaccaactactaaattcttggtcattttagttgttttcttttttcttaaaaaaattttttttttcaacaggtttttgggtacaagtggtgtttgtttacatgaataagttctttagtggtgatttccaagattttggtgcacctatcatctgagcaatgtcactgtagccaatgtgtagtcttttatccctctcctccctcccagtctttcccgagtccccaaagtccattatatcattcttatgcttttgtgtcctcttagcttagctctcacttatgagtgagagcatatgatgtttggctttccattcctgagttacttcacttacttaccctccagttgcatccaggttgctgcaaatgccattatttcattcctttttatgtctgagtagtgttccatggtgtgtgtgtgtgtgtgtatacatacacatacataccacggtttctttatccactcgttgattgatgggcatttgggctggttccatgtttttgcaattgcgaattgtgctgctataaatatgtgtgcaggtatctttttctataatgacttcttttcctctgggtacatacccaggtgtgggattgctggatcaaatggtagttctacttttagttctttaaggaatctccacactgttttccacagtggttgtactagtttacattcccaccaacagagtaaaagtgttcccttttcaccacatccatgccaatatctattattgtttgatttttttgattacggtaattcttgcaggaataaggtggtatcacattgtggttttgatttgcatttccctcataattagtgatatcgagcattttttcattttttttggccatttgtgtatcttcttttgagaattgtctgttcgtttccttagcctactttttaatgggattgtttgtttttttcttgctgatttgtgtgagttccttgtagattctggatattagtcctttgttggatgtatagattgtgaagattttctcccactctgtgggttgtctgtttactctgctaattatttcttttgctgtgcagaagctttttagttcaattaagtcctgtgtatttatctttgtttttgttgcatttgcttttgggtccttagtcatgaagtctttgcctaacaaagctattgtctagaaagttttcccagggttatcttctagaatttttgtggttttggatcttagatttaagtctttgatctatcttgagttgatttttgtataaggtgagagatgaggaaccagcttcattcttttacatgtgatttgccatttagcaccatttgttgaatacagtgtcctttccccactttatgtttttgtttgctttgttgaagatcagttgactgtaagtatttggctttatttctgggttttctattctgttctgttgttctatatgcctatttttataccagtatcattgctgttttggtgactgtgatctcatggtatagtttgaagttgggaaatgtaatacctccagatttgttcttttgcttagtcttgcattggctatgcgagctcttttttggttttatttctttttttaaaaaaattattattatactttaagttttagggtacatgtgcacaatgtgcaggttagttacatacgtatacatgtgacatgctggtgcgctgcacccattaactcgtcatctagcattaggtatatcttccagtgctatccctcccccctccccccaccccacaacagtccccagagtgtgatgttccccttcctgtgtccacgtgttctcattgttcagttcccacctatgagtgagaatatgcggtgtttggtttcttgttcttgcgatggtttactgagaatgataatttccaacttcatccatgtccctacaaaggacgtgaactcatcattttttatggctgcatagtactccatggtgtatatgtgctacattttcttaatccagtctatcattgttggacatttgggttggttccaagtctttgctattgtggatagtgccgcaataaacatacgtgtgcatgtgtctttatagcagcatgatttatagtcctttgggtatatacccagtaatgggatggctgggtcaaatggtatttctagttctagatccctgaggaatcgccacactgacttccacaatggttgaactagtttacagtcccaccaacagtgtaaaagtgttcctatttctccacatcctctccagcacctgttgtttcctgactttttaatgatcgccattctaactggtgtgagatgatatctcattgtggttttgatttgcatttctctgatggccagtgatggtgagcattttttcatttgtttcttggctgcataaatgtcttctattatttcaggagatctactagatgctggagttacagcagaagaaagacaggaagagtttcttcccttatggagttattctctagcctaggaataaaagtcaacatgaataaaatggagaagcaatcaatgctgagctgaatttttcaaatagagtagagctattaatcatattaggtcagagatgtaattctttggtgagagactaataaatgaaataaaattataggtctttttgagactaattgaaattatggaacaaccgatagaataaaactacattctaaaattgtagtttccagattcagacttagaacattccttaattaacttagcatttgatttatagagaactttaatatttcaatagtattatctatcaaatagttaatgaactattttaactttctttgagaaagttaaaaggcagatatctccagttttaacattcggctctgactcaaattttggttaagttttgctgtcacatctagactttattacataaacaaagatttaaattaattacagttacttcaatgggatatataattcagatttattcaactttccccattctttaattactactggtcagagattgttcttgtgagagatacactattttagcatgactcagaaaccttagtaacaaagtgaacattttaaaagcatacaaaatacaagcccgaattcgattcagaaggcataaaattaagctattggatgctgtagtttctcagtgctggtgtgactctctgcccctgcctcatgatagaactaggaaccataacagttcactgagtcatgctaggccatggtatcagcgcgtgcttggcagaccctcagtaaacctttgtgtgagtgggggcatttgttgcacagtgatgatctcaacattactttaataatctataccacatatttatgcttggtattggtttgttttaaaatgcaatttttaatttaattttattattattattttttgagatggagtctcgctctgacccccaggctggagtgcaatgacgtgatgtcggctcactgcaacctctacctcttgggttctaggattctcctgcctcagtctcctgagtagctaggattacaggtgtccaccaccatgtccgactaattgttgtatttttagtagaggcagggttttgccatgttggccaggctggtcttgaactccaaaatcagctattctttaaaaattatgcatttgaaacaatgaagatttagccattctaaacacttctttagaaactttatgcctgcccttccttaatcgattacatttagatggaacttttgtataaagtgttctcctacacatgatctcatttgatcttcttgacagttctgtgactgatattggacacttattattatccccattttatcaatgagttaattgctatttacctgcgattatatagctaattaatggaaggcattggctgtacaatgggatttgtgactcccactttacagctgagctcaattctttctaccattgacctgcaacgatgttttaaataaaatgactactaaggttagatgttttaaataaaatgactattaaggttagatgttttaaataaaatgactactaaggttagactgctaaggttagaggttagactgctagtttctgccaatggatcatttttgccaataataggataattttttttcacaataagaatcctaaaaaaaaatttcatcctagcctcagcacttctctacattaattctaggaaacacttgtacttagatggagcttcctaaggaccagcaatctttttaacaaaagatgagcccttcaaaagctgcctgataagtgagtgcaagaattataaccattgatacacactgtagtcatcaaaaagtcagatcacacagtctattctgcataggactccattcattgccttttaaatgcaataaacttcccctccctttttcacaccatatcctgcctttttctaacctatattaatgattcaatacatatggtgaataaattaagtgatagagtttttttaattagcaagatttttatatagcaagatataacctgagttatacctgtatttcactttgatctaagagaagcaaatcatactagctcttatataaaaactctgtaatggtagcataactattcagtaatgttactaaatgaaaaagaactgcacaatgcattttgttatgcatattttctttaggaattccttcactcttggaataaacttaactcttttccataaatgagacccccaccccccgcagtccaaaatttgtcaagctgaatgatcactaaaatcacctaaagaacatttttaatgttatttttctcaagctttttataactaaaattttcttcccatatacaaaaagctgaaagactagtacaatgaacattcatacaagtacctcctaaattcaatagctgttaatattttaacaaatttggtttctctctctgcctttctctccctctgtgtgtatatacatagacctatctgtataagtcttggcttgatttgagtttaggtaaaacattattgataaaaatacttcttcattgatgtgtgtacttcatattgcattacatcaggtggcaaatgacgtcaggttgtttcatcgctggtaattgtatttaatcatttgttcatggtggtaagtagcagatctctttttttttgtaaataacaaacgtgtctggatggtagtttggtactatgtgaatatcctgttgctaacatttcacctaaaggaaaccatccttttgtccctaccagaatctattgttccatcagactctgttgttacatctacattgattagctggccttcttctgtaaaggtgagcatttctttatcaactgtgggtcgactacagtttcttctaaaaagttagggtaatttgtaatccttcccctttaccacgtttcgagtagatctcaccatatcgaatttttcccattattttttcagggctacttttctttctgacacaactaaatttgctcaccttccaatttcctgcctcagaccccaaatcaaccatttcttcaaggaacctcagttctttttagtgaaggatggtatgtataaatcaagctctaagtgttaggcatacctattgtacttgtatctttgcttcttgaccttttcagtggacagtgcaaggaaatatgtgtatttctcttaatcatgagttcatgttagtatttgtaatttaaatttaacattaattttaaaaattatatttgtatatcacacttaaaacttgcaatatatttatttgattcatatatacatatatagttttgaattacaataaaattctgaacgaagtttaagatttctttgcaattctttctgtccctggggagtttttaaaaatgcaaatattggccgggcgcggtggctcacgcctgtaatcccagcactttgggaggccgaggcgggcggatcacgaggtcaggagatccagaccatcctggctaacacggtgaaaccccgtctctactaaaaattaaaaaaaaaattagccaggcgtggtggcgcgcgcctgtagtcccagctactcgggaggctgaggcaggagaatggtgtgaacccgggaggcggagcttgcagtgagccgaaattgtgccactgcactctagcctggacgacagagcgagactctgtctcaaaaaataataataataataataataataataataattataattatatctgtgcccacttccccaagatcttctgaattagaatcctggagatagaattttgtcagattgtaggtttgtatttttaaaataaccaatccatgatctcctgccctagtcagcctcaggactgctggaatatgtgaaatctgttttactttgggtcatatctctcaatcctccctcccctcttttttccttcttagacatttttataattttgttataatgtaattacagaattactgggcacagggagaaatgtttaaggaaatgggaaaagggttgactgggaagtaaaaagaaaaatcaagaatttgcaggaagatggtatagggagcttagaagctactggcatgaacagtaacttttcataggctatcattatcctcaatatcttccttacagttcttcagaagattttaaacagtaatcctgttttttaaaacaggatttaaaacattatttaataatggcctagcatttattgcatatttagcattgccaggcactcaaagtattttatgtagtgcctcatttaatccttgcaggaaccttattgtgctcatatattaatattccaattttgtaaatgaggaaactgacttaaatatatgtactctgcttaatgagctactttctaaggaaaacacaagttttatctttgccacaggttgggttacccaggaagcgcactctgagattgagatttggatgccttatgttgttagagatacctgacagatctaacagaattgatctctggggatcaatacctttggaagggaggagatgcaaccacaaccactcagtgaagctgagctatgaagtggttctctaccaagtcctgaaccaaccccacagagagctctggagctagggtagttgttcaaagtccttccaatttggagcaagaggactggcctttttacctctgcattgacccatcgctgtgtgcagactgcccctggaaggaggcttgatcttggatggggaccctcttctgctggcactctctgcagccaggggaataagttttttaatcctgaaagggcttctggggtagaactgatcgctgatcacagtgtccaccacatctccagtaaatttgctataatttcttcaaaacaaattttcttgataaagactttttccctattggctattcttttcttatttttcccattgaagaatatatatatttagaggcatttgctcttatgtcattcaccataaactcaaagtcttttttaacccagttgtaccagcttttaactccgtgccttatattacatcggataaaccaaaatatttttatgcagtaacttgctgttttttttaaacatcaggcgtttagcatctccagtcctcaacattttactctgcttgtctttacagccattcttgagaaggttctcaaagaggtcaatgcaagagaaagtcttcatattaatccatgcttaggatctcctcaatttcaaccccttctttgttaaagcgtcctctttgacactcagcatacatccttcatcccgtgattttctggtggagaaaattactcactctcagcttgctggctgactgtcccaactgtctgtcttctgtgtgaacttggaggcagaagggctgtgtgtgctatcactccctggtgtagagaaacacgtccacctcctcctgcctctggtgtacctggtcccttgtatatgggattatgtgctctcagcataagaaatgcctgatttttccatttaaatgaggtgaggctatgttacaaatgcactatttgttctcttcttcctttgggagtatttctggtcttcatttttattggaagacctcgaaatactttaaatatgtttgttctatagtttttaaaaaataaatcatttctgagtatgttgaaactcagtacccagcaacataattttctttggttaataatttttctaaactggaaatgaaatgccttaaaattatgcatttgtcaaatatgctttaatatgtggttaaaagccaatctaataaggaaaaataacctaaaaattagtccaaccattccttttaattccttgcttccaatttaccatgtatatctaccactttggagagaaaaactgttaatttaaccttaatttttaatttaatttaaaaattttaaaatgtaactccatttaaagaagtatcttgaggaagattgaacctgggagcaggtaagtaggagagatcactaaagagcaaagtgtaaggtagagcatttgtttccttcttttttgtttgtttgtttttgtttttgttttgagacagtgtctcgctctgtcgcccaggctggagtgcagtgactcgatcttggctcactgcaagctccgcctcccaggttcacgccattctcctgcctcagcctccccagtagctgggactacaggcacccacgaccacacctggctaattttttttatttttagtagagacggggtttcaccgtgttagccaagatggtctcgatctcctgacctcatgatccacccacttcggcctcccaaagtgttgggattacaggcctgagccaacactcctggcctccttcttttttataaggatgtgtgcctcttcacatagagtgctgtgtaggacttgaacttctatctcatgaatgtctcatgttggcggaggtcatgcagcatgattctcattgcttttaagtgatggataattgagtgattaataattgatttcactgcattctgtgttttttgcaccttttaaaaaaaatcgcttaagctagggtttttgtttctgttttttaaatgctaccccaagtttggttgtgttctcaagtgaaaaacattgctagctatgccgtgtgtgaactttcagcctagtcattttgtggccataaatattgtttctatgagcctcttttcagctgtgctagtcatgtgttttctgtttgttccttaaattatgtaaaatgacccctttggcagccaacaaattttatagcttactatgataaagagcttccttatggaaaaaatattcaagttatataaaatgttttctagcaggtcaatttttttctgaataaatagttttaaaaacaaatttaacaggaagcttaacaattttttgaaaatttgtacaagcagtgctcaatgtagggaataaggaaaaccaagagatgagaaaaattaacacccaaaagctcatcaccagagaaaactgcttttactctctcttcttctagtcatttctatgccccattattatttttgcatatttgaggtgatgtggtgtaaacagtatgtatattcaatgtgtatattctacttcttcaaactaatattatatataaagattttctacaaaaattattttttgaacgttttataattatatactattcagttgtgttaagttcagttagcataatttttctaactgttctcattaagggcattttgtttgtttctagtagattggctagtatacaggctgcagtgagcatttctgcataatgtctcttctgtaattagaattgtgtccctagaatatattcacaggtctgaaattttgcagtcaggaggaatgaatgcttttaaagattttgatactcacagccagatggctttacaaaaaaaactctaccaacattaaattgtttttactttttttccccgcctaggagggtctaagatctttgtgaccctaaaaaggttaagagccactggtatgtttatgaaaaacagattttatgcttcttgaggtcatcactgccttttaacttccaggaaccctaccagtaagcataccctgaagtagatgtgcaagaaatttgttgaaaataatgatcttagtgagatctgcatgtgaccaaaattgaggatgcctttcaggaatactaacatgccttaggcagtggaaagggtggccaactcctctttggtgtcaatttgaaaaccttattttatttacttcatattgtcagtggcagacaacagatttttgaagaccattttgtgtttttgcaaaatcacaatagcaagcacggtagctcagtttaatggtcctatgtgccaaagtgactagctgaaaataaagtatttcatttttatctgtagcagtcaagtcacatgagatgagtatatcatttcctgcatattacaatttattacatcttaatattcacctaccctagtgggcgtcatagtaagtttttacttctattacagtagcctttcctgagctgctttattatgaattctagttagtagtattttattggtttgaaaataaaggaaatttttattgaaataaatgtattgaaattaacagtgattctaaggaatatatttgttttagcatttaaatagtctacaaagataactatcaatttatttagctagaagttccctagaaattctagttaaggatatgaaaagcatggatgcctccctcgacctagagagagtataatagttaagaacatggaatctgtagccagagaccttggatttgaatcctacctttactgcctccttggagcacggcttttatcaagttacttaaactctgtgcctctgatttcttaactgtaaaatggggtaatagtggtatctagctcaaagagttgttgcaggaattaaaagagatacgtatgatgcaggcagaatcatgcttgtttcattgtatgggttcttctaccttctcctcatcgtattatcgtagtctttgtagtcgtcttcatgatggaagtcagtattcaatgaaatactttctctgataaattgatttactactttttttttcatttttatctccatttttcttggtaagcctttggaggttctgttccaactttgacaatgctttgactgacacattggcaggctgtcttaagtgtgtgctatagtaacaacatgcttcctttttcatttatttgtagataccaggataaatgtgctgcttaccttcattataccaggtaaaagaagggaaccttttcaatagaaaacaaaaaacctgtatgacttagggtcatcagaagagtatggcaaaataaaactgagatattcagtgagacttgccagtgtagtcttccaataaattattgcatattatttgccagagcttcaccttttgttgcaaacagatagcaaatttcagttgcaccacttcagcagcttatgttcatcaactgaggttggttggaatgtgtcagaccagctaaatttaagcatatgttatatattctttcagttaatgggtagagttgcttcctgttgcttaactactgctatgtttccttctctcaaagtgccaaaaagtttttgaaataaaatgattattttaatggtttggtattgtgaacatggttatggtaaaattagaatattgcttctttcatctaaaaggtggtaggtagcaagatgaagaaatggaaatagaaagtaagggaaagttaaagttaactatcatatttttaatgttttaatatgagtataatctgtttactatataaatcagaaattaaattaggaaaacattccatattattctgtatgaaagtagtgttttgatatgtcactcctaatcctcacttgggtttcatagtgaacattttcatgtgtcctagaaaacagactgttggttgtatttctggataagtactctgtgaggggttttctccctttctctcactgatacctcttacattatgggaggggagaaaaatggaactctggtcttatatataatatagttagcatgtcctgggaaatatagtaaattattctgtgatagtgtaattatcttctgctgtctttatggaaccaggcatttgataaatttttggttagagtagaatatcagcaaagctataggaataggctcaattgtgaataatttagttttcctccatagccacagcactacttttgctcacaaaaaggcaagagtattcatgagcgatagtttgaacatctaaaaattcacagtagtacctcagttggaacagtctgcttaacataggttgaaaagcactttagtccttacttatgggacagactgatttaattctttgtatcaaatttttaaaaatgtttttccctttatttcacaagctgtcaggggaaatcatgacctaacacattgaaggaacaaaacacctttgacaggcagatctcattgtgcagtgtaagaattggcttctttggtgtaactggttgccaaagatagccttataacatgattttaaaaagcagaataaagagacattaaagtatatattaatcgcatgttttaaaggcccctcgagttaattgtttttgtaaatttctgggtttctacaaagtagaagtcattatcaagcagtcttcttgaagttgtttagcattgtggccaccagcacaggatcaggagtcacaggccagggttcaaacctacatcagtggcttactgattgtgtgacttaatgatgtatgatctcctctctaatctttggcttcctgaactataaaatgtgagagtaaaattacaggtcctgtctcactggatagttgcgaggattggagtatgtaacatacttaacggtgtctagtagttttattttttaaaatcaaaaattgcactgctgttgccccaaaaatccatctaaaaaacataaggcaggccctcctttaaatatatggaggccaggaaacatgtttcctgttgaataactgttattatttttgtatatgggagtagaaataaggaaactagaaatggcacagaatttaggagaaaggaagacacataacagaagctcttcctgtgcaaaaggagcaaaatactaagactctcctcaattagagctttttagtctggttggggaagaaaaactaacatataggacagttagagaattataaaaatattgagtagaaattcataagaggaaaaatatcactggaactagagcagatggtgggggctgagtctttataaatggaattggaactgaacttagaaggaagagaggaggaaagcagggcagtgctgtaggctaaggctggtaagtgagcaaaccctagaggcaggactgaaaataattttttaaaatcatctcctgaagggacgtgactgactaatgagtacagggacaccttgagtgagtacatagtgggtaacactgaagccaggcaaagagtttgagcctggttagggagactttcagtctcttaaaaaaaaaaaatccctgacatatactagaaagcagtggtttttataaatttttgattgatacatatgaattgtacatatttatggagggcatggtatattttgatacatgcatacagtgtgtaatgatcaaatcagggtaattaggatatctgttaccttgaactttttttttttttagagacagcgtcttgctctgttgcccgggctggagggcagtggcacgaccatagttcactgcagcctcgaactcctggcctcaagcaatcctcccacctcagccttccaagtaactgggactacagacacacaccaccatgccctgctgatttaaaaaaaatttttgtaaagatgggggtctctctatgctgccgaggcatgtctcaaactcctaccctcaagagatcctcctgcctcagcctcccagagtgctgggattacaggtgtgagcttgtaacattccttttctttgtgtcgggaatgcctcagatcttttcttctagctattttgaaatgtacaataaattgttgttccctatggtcaccctactgtggtactgaacactagaacttattccttctatctaagtgtatgtttgtacccattaaccaatctctctttacccctttccccttcccagccactgttagccatcattctactctacctcggtgagatccacttttttagctctcgcgtatgagtgagaacacgtggtatttgtctttccgtgcctggcttatttcacatagcatgatgaccttcacttccatccatgttgctgcaaatgacaggatttctttctgtggctgaatagtactccattgtgtgtatacataccacattttctttatccattcatccactgatggacacttaggttgattctgtatcttggctattgtgaatagtgcttcagtcaacatgacagtgcaggtatcctttgatatattaatttcctttcctttggataaatacccagtagtgggatgggtgggttgtatggtagttctatttttaggtttctgagaaacctccatactgttttccataatggctgttgtaacttacattctcaccaacagtgtataagagttcccttactctgcatgtttgccagcattgttattttttgtctttttgataagaacctttctgactcagatgagatgatacttcattgcggttttgatttggatttccctgatgattagtgatgttgagtattttttcatatatctgcagtatttaacagagctaagtctaaatgcaatatatagaatagattaaatgggagacactgttggattaattcagactgcagtggttgaggatttggatcccaaagaagagaacaatgccagtatctgcaccaattccatctttcctattacatcagaggggttgtccgcctcccagccaggccagtccccatgactgctttggctcccatcccttcttcattctcaagaactttgtgcacttgattaccccttctctcacatgctttttaatgtctcacccttgcctttgcttttaaaaatcttcaagcttttcctattaaaaacaaactaaattttctcattccacttcatatttcttccagctgcctcttcatctctattcatcccttaacaggcaaatcaaatttttcaaaaaatgttgtctattcttgtttgtatcgtttccacatctcccaactccacacttccactcactccagttgggctcttgacaccattaccctgccaaaacagctgtcactgaagttatcagtcagcttcaacttcacgttaccaaatgcaatcctcatcttgcttggcttctcgacatagttcaccgtgccctgtgtcttgaacacactgttttggtttttggttttctttccacatattgggctagtcatctgtctcttctatagtctcaccctcttccatccatcatgtaaggggtgaattcctcaaggcgggatccaagatcctctccttttctcactttataatctctccatcactcgtcttattggctcttgagtcaattattatctgcataaagatttgtgccaaattatattctccagtccagacctcttcactgagctataaattctgtttctgtctcctcttgaatgtttcagaagcacttgaaattcagcatatctaaaagggaactcatcatcttcaattctggtctatttcagtgtttcctctctcagtgaatagtatccagttgtataagttacaaatcttaaagtcattcttcatacctccctctccttcatcacacatatccaatccatcatgattggatagcaaaagaaaacagttgctcattttacttcgtaattactataatttgaatgtctgtcccctcaaacctcatgttgtaatttgagtcccaattttggaggtgaggcctaatgggaagtgattgggtcatggaggcagatccctcatgtattgtttcagtgccatcttcactgtaataagtgagttctcattctgttagttaccaaaagcactggttataaaacaaaacaaaagaaaacaaaaaaaaactggcacctccttctctctgtatcttgctccctgtctcgccatgtgatctctgcacacacctgcttcccttccctactgccatgcatggaagcagcctgaggccctatcagaaggagatgctggtaccatgcttcttatacagcctgcagaactgtgagccaaataaacctcttttctttataaattacgcagcttctggtatttctttatagcaatacaaatgggcgaagacactaattaacccttgaatctgtccactttccactttttttcttccaccaccaagattcttatccagactactgctgtctattctggaatctatcctcagtcactctggcctgtttccaggtctgttctcttactactcagccaggggattgttttcaaaatgcttctgtcccttccaaggtacattaaagctattaactcactttttactgctctcagatgaagtccagatgcattaccatggacaccaggcctggcttgatctagctactacctaatcttcagcctcaccttgccccaggcacgcctcactctgtactccagccatatctagtccttcttgcttggcataggccttccttctacaggcactttgcacaacacgttctctacctgggatactcttccctcctgtcttcacctaagtaacttctgttctttcagatctttgctcagtgatgtactcattctcaagaaagccttttcttttcttttcttttttttttttttcttgagacagagtcttgctctgttgtccaggctggagtgcagtggcacaatctctgctcactgcatgctccaccgcccaggttcacaccattctcctgcctcagcctcccaagtagctgggactacaggcacccaccaccacgcccagctaatttttgtatttttagaagagatggagtttcactgtgttagccaggatggtgtcgatctcctgacctcgtgatctgtctgccttggcctcccaaagtgctgggattacaggcgtgagccaccacgcccggccacaagaaagccttttctaacttcctaaattggatcaattctccttgaagtttcttacagcaccatgtttatatgattatttgtttatctgtctgccccactggacagaaagagccacaaaagcagggatgtatttgcttacctttgtatctctgtaacctggtacatagtaggtactcagtacatatttgttaaaccatcagttaggcatttgaaaggaatgtctagggcacagcaacaaggggatcacaaaaatgctttgtgtgctctagaaggtagaaagcagtatgacagatccatcctctagctgggtaggagagaaccgtgaggagtccagaggcctttctagttccatgctcctggggcctccaccgttgtctatcagagagctggcgagcgagccccactgcagcactgccattaccatacttccctggcctataccttcagactttgtcattcttgttacttcaacatcatgactgcagtttttagccctgttgaccactcctgccttgaaattctctcctactttgccttctgtagtattttatttttaagttttttcttatctctctgacaacatcttggcttctcttcccactcatttgctctatccgagtactcattccaaaattcagctttgatctcatggctcccatgtaagaggataaagtctgaacctctcagcagttcttaagagaccctctgaggaacttgccagtatctcaagtttcatctcctgcccttctgttatagcaaatgatttggcattctctaagcactccgtgtttttatgattttgtgccttttcctcatgccccaccttacatccccaccgcctatgtactggggagcctctactattttcaaaacgcagatcaggtcacttaggcctgctcaggcattcccttcctccaggctgtgactcccttagaggcaaggcctttttctataacatggcacttttatatagagtacctggcatatagtagacctgtaataaatattcggataacagaaaggacagttcttttatcttttaatgatgcatataaatagtaacctgaatgacaaataacactcatgataaaccagagtatcactgaataagcattccttcttgagaacagacctcttgatagttaaaaagtaaaatgtcaaaaagtttattacataaataaccttgatctactctgactgtatttttctgtctcacataattctgttacattgtcacaccctcctaaaatggatttctagtcgtgccatggtaataaaatgttgttctaggctttaaaatgatacatctgccctgaaagctttgaggtatttttttccctggggtggttattttttcagattgccaagagaaggttatcatataccaatcataatgtatgtgttgtaaagccacacattgcaatactttttttatgagctgttatgtaagccatgcttcagggcaaagcagggatgcagtggaggaagagccgttttatgcatttccagctgcacaaagtagtaacatttcatgtggcagtgctatattcattttcgagtttctcccctagagggataataggacattgcttttttgcctttcaaaagggtataacaaacattctctcccaacacaaatgccacatttgacctcattctgctctcagtcagtaaaatgtttttcttagtgtcataagaattattttctgttggtgactttaatttcctataaggtttttaggaaggtttggaaatcattatatggtttcactgggtttgccagatgtgaaggaggattaagaattaaactgtttgcttggctttggctggtattagattataaaatgcacttttattggaaacaagaatcaaaggataggcctaaataagtacttccctggattaaaaaaaaaaaaaaagtgttaacagtgtggtctccagggattgatattcggaatgctattttaaaatattttaaagagcatcgagaaaagagagagtcttagctcttctaggtactaaagtagggttgattggcacaagctgaaagttcactccaaaacattatgtgagtgggcagaagaggagcagatgtgacctcattttcaatcagttcagcttttaagccattcccctttctccacctgatgaaatgctgtggttattcttttgaagggtctgtttagcagggttaatttcttattatcctactaagccatttggtttttaaatgtatatttcctctctccatgtgcatacataatatatatgcatacataaattattcatatgtttaaaatttctcacagattttattttacaatctttctttcattactttgctttcattttttttctcttcactttcccaatacctttcttatttttagacagatcattttgtaggaataatgtggtaagatatttcttgtaaaatattgacttctattaaaatattttgtgtaatttatgatatctcatctttagaataaaaatgctacttaggagctttctttttaaaattcaggaattgcttagttcctaaacatgaagagttaaaatctactagagccttttattatttctaaaaagtataattatcagccttttagtagctatgagagatggactgttcagtggcattcatatgccttgtgtttataggcctgtcttgtcatacgtgctcttaccactgaaatgatggcataaactttgacaaatgcagttttatcaccttttgaaatatactacaaaacgatgtattaactgtttaatatttatgtgtgatttttttcaagttcagttcaaatcagctaaagagttaatgttaaatattcacaataaaaaatattttttaaaacctgtaatgcatatttatgattcagttgatgagccaaagcatgaatttttataaggtctctgaaagatagaacttacatagattttataaatattttcaaatttcatgtgttacatagacttcttaattagttgtctatgataactttgatctgctccaattaaacagtcttaagaataaaagtttttttgtaaaacaataatcaatttgttgtttatttttctgttgcaaaaattaacctgtattttggtcctttaattacttgcttgtttttaaaatttattcccacttgagtattaactcatgtttttctgacctgatttagcagggaactgtttgcaagataaattggccaagagaactaagactaacatcagcagatttcctttttcatgtttaaataaagtactcattttccttgaagtgccaacatgatttatccaaatctgaggaagagaagaaactaaaaaaaggattattcaaattttagatttgtagggaaataatgttttcacttatctcatttggattcccaaaatgctagcttaaaccaagccaagcagtggcataagataatagacccaaaatcagtttatattccagcaggataatagatgagccacagctggatgttctccatttactcatccatgaacaaacatgcactgagtacctgctgtctactaggtactcgggacacacagataaataatacacagtatctgtcctcaaagagccctcactttgactggggagaaacatacagatactaaggcaatacagaagtgcaatgttagaaatattcacacgtacgaaagccgaaagtgcatctgtgtaaacaaaacaaaacaaacaaacaaaacaggacccaggaccatgggaggagggcagagtttcccaggagctggttcctgagtttaaatgtgctggtttgaactattgtgtagttaatggtaagttcacatttacaaaatagaacattagacattacagtgttaacacaaagaagggttttgtatgaaatctccctttttccagtaataattttaacttatatgttgagaatcggaagtttttattttgtaatttaccatgatgcctttaaaatatgccgtgcattgttatggttctttaaaagtaaatttagcataactttagtaaatttgatcacctactttagtttggatgaactaaattttgttcaaaattgtactatatacttctgagtaaatataacggatttgttacccatatttactaatatcactgccaaaaccacttttaaactatacctaatcactggaataatctagagttccaaaagatcaaacttgtgacttagaagattttgtatttctgaagtttttcttcttaatatagcctcttatctctgaaacactttaaataaatgtatatcatctaaagaaagttatacttgtccattaagattgggttctggtaaaataaaggtaatatttcttgtcagttgaagagcaattttcctaaagcctgagtgaagaggtgcctccccaccagaaagtatattcactcacaatgtccaatgatctgagattaaatgtcaaatacttactaatgtatctacttgaaatagagatggcaatggaaagtggacactggctaatttttttttttttttttttttttttttttgagacagagcttcgcttttgtgcccaggctggagtgcaatggcacaatctcagctcactgcaacctctgcctcccgagttcaagaggttctcctgcctaggcctcccgagtagctgggattacaggcatgtgtcaccacgcctggctaatttttgtatttttagtagaggtggggtttctccatgttggttaggctggtctcgaactccagacctcaggtgatctgcccaccttggcctcccaaagtgctgagattataggcatgagccaccgtgcccagccgaaactaagactggggataccatcagtgcataattattgtccaaagacagaacatatgggactaatatgtcagtgttttttatatactaaattgaaataaatctggtgggaacaaacctgtttaacccttgtttggcttcttcaatgattttaaattcttagaatggttcaaagtttttcacattgagatccagctccccatctttcacctggaggaagaagctctgtggggggttagaaacagggggatggctgtgcatgctttgcttctgtttaaaaagggaattcagtctccagaagggaggggattgcactggatgcttggagcaggcatcagaacatgtagatggttttggataatcttcatatgaggttatcttcaataactcaaagagttgattgacaaaaaatagttgattagccaggcacagtagttcatcccctgtaatcctagcattttgggaggccgaggtagcaagattgcttgatcccagtagttcaagaccagcctgggcaacaaagtgagaccccatctctatttaaaaaaaaaaaaaaaagaaagaaagaaaagaaatagttgatatttttctaatgagcatgtagtatttttggtacatttaattttcctgttaagtcaggcaaatcacgaaattatactaatgatgtgggagaaattgcattaaaactgggggaaaagagcccaagacttaaaacttacctcatctagatattctgtagttgatcataattactgtacagaatgcagagatctttagaaaattattgtgttgatacagatggggacttcttttaagaattccaaatggtaatgcataaaaatcctaagattggttaacaagttgcaaaattgtgagatttattgagaggctcttatataatggaaatcttccttttattcagatgactaggtgatcaaaaatgtgatatagacaactttttaagaagatacctttgtttttgaaacagggtcatgctctggtccccaggctggagtgcagtggcacaatcatggatccctgcagcctaggaagatacttatttatttcagtattcttcattatagtacaggatagatctgtattatatactgtattatatattttgcttgtttggttaaaggggggtggcatttaattggctcaaaatgcccccttagaaacccgataaaatcttcccagtaggtggctaaaactgcttcacagacttgcccacttgtaactgcagttaccatagtatattagaagtcttgagataaaaataaaagatataactattagctattccataataggcatcactccattgtcaagagtcccagtgtttcaatctgtaaagtaactttgggacgaactggtttactgtgtagtactcagcctggttaccctgcttaagtttaatatacagtattagagttgctgaccttgatttcttttagtggagcattatgatgtcaactctactattttctctattttgttaccctttggtttatatcttggcctgatacttaaagaaagggaaaaaaaagataaagaagaatagcaattcctctaagcgggtctatttctttgagcagataattcttaccagaatatcatactttaagccacacctagagcttatatagaatttttatatttccatagttacctgaaagcatgcttcatccattttcagttctgccctagttgctaacagaggcattgccattggaaagtggccttcaatctctttctagtttagggatattaaaatatacttggaaatgggtcctttcctgtatggatgacattctagatatttaaggactggtaaggtctctgtttaatcttgggcttatccattttaagccctgattaagcacaaattccttgaccatgcccagcagggctgcagctcccaatgcagtcatcgctcagtgctctgaaaggagcaagacatggagctcttcagtcagccggaaatgtctagtccatccagctgtaactaagcagagagaaagaagggtactgaggctggtgcactccacattcccacccacatcctgccacatgttggtgagagtctggggagccccagcctactggcacgccttgttccctctgaatttctggagcttatttatttttaccacctccctctctgctttctgtgtccattccttctgctccttttaggtaactgcagccagagaaaggatgctgataggatttttctgaagaaaggtgtttttgatcaagagagttaaaatcacagaatgaagtttggcttgttatacctttaaattctgtggctcatgaagcatgataaccaagtagtgtgcatgttgttcaagcagtggccctttcctaaagctaagtcatcatttctcaagagatcatgtgactgcataagctcatcattaaaagcttagttttctaggcttcacctgtgatttcaaattcaaacaagcctatgttactgtcatttgctctaaagaccatttttctaaatccctttggatttatattatctctaccaaggcatggccatcttggaaaaatattacatataagcaggatttgggggtaagaaggggcactttgtaagttgtaaggtggatggttactagcctgaccttacttctggtaatccatattaccatccagtgataagtggttatatttttcagtccatttccacctttatgaacatactgatcttggaaaattatctactcatcctcttttccatttctgtttaacagtgattcattagtttgggctgtagagtggatcagctggtgtttacgaaggtatcattgtaccagtgagtcacagaggcatctactgattctcattcactctcagaaaggaggagtatgtagctttcctcctcaggggagtaaagtattacaccactttatagccgttgtttgaatcatataattaagatttgatgtgattattcttagttgacttggggttagacagacaattcttgtatttggttttgccttccgatttaatgacatgcagcctctgagaagtgagcaaattcaatttttctggtgctattatatggcattattaaaagtacagtgccgtgtagggaatatagagttatgttcttggtgaattcataaggtattgccagtacgggtctatctgatttaagccctgctctcccattttgtattttccattctttatctccccttttcttttcggagtctatcttaccaccaaagcagaaattttaggattcattcatttattcagtgagtatttattgaggaattatgtgccaggataagcactgggcatgcagtggtgcgtacgatggacatagcctctgcactttcacagaacttacagtctagtgcagggactagggaaccaaatccagcccaacacctgtctctgtaaatacatggttactggaacacagccatacccattcatttacatattgtctatggctgctcccacactgcagaggcagacttgaataattaccacagggaccctgtggtctgcaaagccaaacatgtttactacttaaccctttgaagaaaaagtttgctgacccctctctcatggatagtgctgaagacatttcataaatgcagtctagaactggaaaagccttgccaacccccttgaggagtgtgtattctccagagggcagtgggctactgctggaatatggtaagcagggaaagaaacatgttgatgtatgaattttagaaaagtccctgtggctgctgtgtaggaagtatgtgtcagggcgagaagcactaggtcatagtagttaagagtgtagatcctgagccagactatttggattgaaattttgactctactacatactgattctaatcttaggtaacttccctgtcagatgtcccatctataaaatagacatggcaatcatagtacctaactcatgggattgaataagttaatgtatgtgaagcacttaggacacagtgtttaccatcatcactattattcctattgtaatcttgttcagaggtgagggtgcctgaattaaggcagtagcagtgaggatgatagaaagaagtggccagatggaggctctacacaggtgatagaattgacaggaatttatgattaattggatgtcagaagggtagataaaagagaataaaaagttgagggtgattgcaggttttggatttcatcagttgagtgaatggtggtttcagtccctgaagtaaggagacagtcagtgaaacaggcttgtgatgtgaggtgaatgataggttcagtttttggtatgttaaatttaggtactagagagatatgaatagaaatgttcaggaagaagttgcctgtaaggttttgagttcagaaaggtgatacgggctggggaaatggatgtagcagtgatcactataaaactggtcactgagcttggaagagaatgaaataacctagaatgaggatggaatgacaaatagactaataacagaaccctgaagaacactaacagtttaagattagacaaagaaccattaagtcaaaaaaaaaaaaaaaaaacaacttttggaggaaaataaacatgaatttttaatccattaaaatttctgtcattgaaatagttgaatttgaaaaatatttaaatttgcaattttggtattagcataggtcaacctaaactatggcgtgtatttcacaatttgatttcatgtactatcatattctatattcttctaatattcaatttcttctctatggaacattaggtaacttagtggatgctatggctatggatgctgacatcatatgagctgttccaactactcttctatatttaataacatttccttacctccctgtttaccaattcacttgagcctgtgaaaggaaaaactgaagtggaggagaatgtctttctcctttttgtgttatacttgtttcagcatcaacaactgggaaccagtttgttacaacattttataatgatatctctatattaatttacttacaacactaacataagtaagtataattttggaaggagccaggagataaattggagaaacgaacactttttccatcatcagaatcaccccttacctctctcttacagtcatgcgtgccttacactttacttagttaattcccaagagaatcttcagttcttcctgaatatgatttccaaaaaaacagccttctactcacttactctgacccttagtatggctcacaggttaggctcaagctaagtctctgaggtgggacaatcagaaggctgatctagaggctttctcaaccctgtaccacacatgcctgaagaaaggcatcacatttatacaatcaggctgtgttgccttttctatttaggggggaacttgtgaaaaactttgaaatgctcccaaaagatgtctgtctaactcaactttccagcttatctcaccctttcctattttacaatcctggaaattacagaaaactgagagtgatgcaaaggactcttgcccattgaaatggaaatagttctggtggaatgcaattgattattgccctatgcagagtgaccaatttaaccagatttgcatctatttgtaaattctttgcaatattcttgatgtttatgtttgtcctttggatttatttttgaaccagttgtaatatcttacaggttccttttttaatgagttagttaaaatttatgtcccatcttcaaaaaaaattatcttgttatatatacacatgtatgtttatacatgcatatcacatctgtagaaaaattcacaagaagttggtagctgtaattacccctgcagaaggaaaggcaggaaagcttgcttttcactacatgcccttttggatgttttgaattttgtgttgtatgcctatgttacctaaacaaatagaaaatttttaaaaatttctttttgaactcttgaaaatcaagacttagcgatcccttgactactaatttcacgtctgaaataactgactttctataaaggtttttgcctctaaataaactactaatagagagcagcctacacatcaacatcatacttagagacttacttttgtattttttaaggcaaactagtaaactttacttttcaaggtagctctaaccctgtagaaagattttggtcgggtggtgctaattctatgactactctgttggggaatcacacagttttagtgtagagggaagtggcagacccatcagcctattttgcatttattctgtatgcaccttgcctcttcaccagctgtgtcctctataatccccttgtctaattataacgagcagccctcccattaagccagtgattctcaggcttagatgtatattaaatcaccaggagtgcttttaaaaatcgaaatgcttagaccaattgaatcacaatgtctgagggtaagacacagacattggcattttttaaagtgatcaaggtgatgccaatgttgagaaacagtgtcttgtgcgaagaatggtactggcttaggaaaaaacttaacaaataatacctcagaagcaaaagcactcaggatatctgactggaagatctgcataggtgatgaagacggcccaaacagaaaagagaggcaccctttactgtgaatgaatatccttgtacaaagaatctgttttgacccatgctgcttctggaatggggcaaactagatatgggggagtggtttaaaagcccgagctgacttagttacagatattagctttttttatacttctgatttcagataaactctcagtgagtaaaaaataccaaatcgggactctgcatatccccgccttgttcctctgccatttggggcactgagccagcctgctgacagtgacatccatctaataccactgccaccatatggttgtgctaccgacaaaaggttatatttatcacacacggtacaactgggaaaaccacatactgtacaaacatgacctattaagcatctgttttaatcaaagattctagaacttctttgctctaacccttaaaaatatgctttattaagaggtctttgatagagaagtagatttgtaaagggagaagtaaaaatgcatcctttcattaattttgaaatagtaaggcgaggagatagcctatttcttggtatttcttctctaccctgaaagatatctcctaatgggaagtcctgattaatggcccgcttgtattccaaactgttttattgttgcctcagcctttttcaaaacctgaaaattggtctcatgagctctactgtggtggtttgccttcatgtactcattgtatatcccctcccttttgtataggaagacagagatgtcaatgaccccatgcccaaccgaggcggcaatggactagctcctggggaggacagattcaaacctgtggtaccatggcctcatgttgaaggagtagaagtggacttagagtctattagaagaataaacaaggccaaaaatgaacaagagcaccatgctggaggagattcccagaaagatatcatgcagaggcagtatctcacatttaagcctcagacattcacctaccatgatcctgtgcttcgcccagggatcctcggtaactttgaacccaaagaacctgagcctcctggagtggttggtggccctggagagaaagccaagccattggttttgggaccagaattcaaacaagcaattcaagccagcattaaagagtttggatttaacatggtggcaagtgacatgatctcactggaccgcagcgtcaatgacttacgccaagaagagtaagcacacatcctcttctttctaaaaatggggcaactgttgttttcataggtttttaggtttagttagattgttagaatgaagaaataattattgatgcctttatttcaaggaaataagaggatctttgaacagcaaaatggtcagaaggaggcagtccctccatttatgccattgtattgaaggtgggctgtataaaattctggggccctctacgtcagtgctattcaaaatatggtccccagactggcactggtcaatgaattttttgttaccagtccacagtgagaaaatgagcttgcaccaggatgtaagtcaactacactattaaatattttgtttagtttaagtgacaactttttaatagcaaaacttccttgatttgttgattttcattctggagcaagtgccttatcttgttgtggaacaatagcaaacagtaacagtgttctgggtgtctcacatcattaactagatttatgtttcctttaatttttttccctcagtactgaaactggaaattgaaacactttactatatgcaaaagtaacactcagatagataaaactgtgacctaagatttccaattcttttcatgtagtatgatttttaaatgaaggattttcagctcttaacttttgatggatagtgattactgaatgaactcaaagcttttctctttcagtttattcaataactggttctactactataggatctacatagctttcattaatgtagttggaaatttaattcactgctactagaaaacactcaaaatgtattcctgatgatgtattgttagcataatcttcatttttaaaaggttaatacagcaggtgctcacactcccatacctgttcacatacacgtatgcatgtacacacacacactcacacctattcaccagcattctttatgaccgctaagtaaaatcctgtgtccaatataatgccatttaatagactttgagcattcctgtacatttactggtaaaagtgagaagagatgagtgaaatgtgcaaagaaggtaggagtggaagtgcagcagtgtgatggtgagtgatacaacctcttatacagagaacagtcagagcatctcccagggctgtgaaggaagaatcttagagtaatttattcccagtagagacttgcctagtcatagatagcattgccagatttagcaaataaaaatacaagatgcccaattaaatttgaatttcagataaatggttaaaaaatttagtatatgttccaaatattgcatgggacatacttaaaaatttttttaaattggatttccctgaaatccaattttaactcggtgttctgtgttttatctggcagtcttagtcaggagataaagatggttgttaaagagttacagctgccatgtgaggaccctttaggacccctaacaggatctcgagtccctcgtctagaacgtgtctcagttatcctcagtgcagcactcagtcagatccctcatctctgttacagaggtgctttgcgaaatgactggtggcatttcatcactgtaatgagggagaagggaagggactttctgctgcaggctgggacttagtataaagttattgaattctcacaaccaaactgtgagagagctcttacctgtgtgtgtgaagtctgaggctcagacagagttgtgacttctttgcatttacctagaagaatggcaaaactgtgagtcgcccctaggtgatttggtgtgaaagcccctttgtctccatcactgcacacctgaggtatatatctctctctctgagtagtgtacctcagtgcagatgttacaatcagagggtgagcttaacagtgtggaaacaagaaattttagcacataaactgtttatttaaaaatatgtcacttaaaacaccaatataaatatagctaacttttcaatataagaaataagaaaattaaatgatgtacaaggcttaaagcagggcacaggatttagagacatcctctgtgccttcctccccttcacccctcacatccagtccatcagcaaggccccttggttctgccaccaaaatgtagcccagatcacttctgaggtccgcttctttcctctcctctacctccacctgaggccatgcaaccatcatctctcctggaatcctgcagaagtctcgttactggtctttccatttctactcttgcctcttactgtcttttttttcagacagaaatcagtgtggtcttttagaaacccaaatctaaaaccattctgtgccttcccattgcacttaaaacccaaactcctaacgtgcagcagcccccacgctgtggcccttacccaccttgcagacctcttcttgctactatacttcttgcccacatagtccagctgtgctggcctgtctcaggtcttctgcatatgctcttccctcctccatgaatgcttgttcctttcttcccatgacgggctggctccttcccatcctttaggcctctcttgcacttctctaaccatgctgtctaatttgctaaggccccactttattctctattacttctctttagccattttcttcatggtatctatcaaattttataattagatattggtttattaagttgtttattggctgcctttctcattagataagttcctaagagcaagaactatgcctatttgtaagcctagtaactgacaagtaggaactcagtagtagtacccagttggtaaatatctgtcgagaatgaatgaacgtgtgaatgaaatcagccagggttcaaaccttgatgccatcactagatgtgagatctttgaccagttacttgtcctctctaaccctcagttacctaaacgttaagacagatctaaccataccaatctctcaggattagcattagaattaaaatgacataattgactacaaaaagtcttttattagcctgttggttagaaacctgagtattattagctgtttttactgctatggtattttcttccttaccttgttgtcaacattcgaatgttttcagttactatttagctttgataggctctgttgctttttggaaaacataaatgtcacacattgccttgtctacatcctcttgcttctactagtaccttccatgatgctaaagccttcatttcctttgaaaatttcagacacactgatttccatgggaacctcgcatctctgagtcctccttgcaccccgcagtttccttcctgtctcctttctttccttcttccatgccttgcatagccagttctgtcccgtgttctttcctctggcacaactggagcagtgcctagaaataggacattgcatgtttttgtgtattatttctgtaaatattgtgtctccagtaaaattaaaaggcccaaatctattttagtaaatgctcctaagcctctctttgaaatcctatactagtgataaaagtcattttttaatatttcaaaatgcccaaatataataaatcccagaaacttttttaaactgaatccaaattattttttaaactggattctttctcccacttaaaaaaaatgagataggcttcattcctttttgaacacttacaattcagtgtagagtataacatacttttctaagtaaaattatttatactttagaatgtggacaatctttggaatttttctctaaaataataaccaaccatgaataaaaatcgcctaagtgttgcatattacctaatatgcatattagcacttgtctgcttttactagcaacatattgaaaacatatcgcacatccatattgtgcacatgaggatgcacccttcctcatcctcatccctcatggggaatgtgcttggagcccctcagaagctggcttgctgtggctggctttttgccgcttcagaacacaggccctaacagccttgttctcctgcctctgtctgtcatagaaatgaggcacctgcatagcttagagaccaggcttgggctgtttgtccagctgtgacatctgacactgtggttagcttgttcgttcttgcggctgttgtgtagtctttgtagatgaatgttctcttccctagaagcaggagagaactgtccagctgctggcatgactcacacttctgtatgtgatagctttgaattacattcactgactgagtaatttattggctgttgattgcgtgttaaaagggtgagtaacagtattttgagtgaactggaggcctgcttcttttttaaagacttgagccaagaatgacttcacctgccttcacacttttttctataaaatacaaatatgattttcttcacagttcaacagatattgagtatctctaatatgtaatgcactgtccctgccttcaaggggctcaccatctaccactagggagaaaggaaagaatgccataatgtaaggcagaatgtaagaaccattagaaaggtattttaataatgtggttcagaggagtgagaggtcaagttacaggggagtcagaaaaggatactttgccaggcatggtggctcatgcctgtaatcccagcactttcagaggctgaggtgggctgatcgcatgagtccaggagttcgagaccagcctgggcaacatggtaaaaccccatctctaccaaaaatacaaaaaaatcagctgggcgtgttggcgcatccctctggtctcttctacttgggaggctgaggtgagaggatcccttgagcctaggaggcagaggttgcagtgagccgagatcacaccactgcactccagcctgagtgatagagtgagagcccatctcaaagaaaagtaaaagatagttttcttttctgagggggatactagggaagaccctgaaggatgagtagggtgccttcaggaagagggcacttgaacatgtagtagaagacatgagcatgtagtgcggtttacttggatctggaggtatgtggagggaaatacagctgggaagatagtagggcattggaagactacatgccattcacagagtctacattgaatctggtatttgggaagacccactgaaggtttataaagagaactttggggatttcaaactagtagaggtgttagagtagattagggggtggaggcctgttagagggttagtggcatttgagtgggaactccagtggaggttatagaaccagaaaaaggagattcagtgtaagagaacaaaagagttagaagcagtaggccttgggaggtgatggagtggaaggggaaatcaaagataaatccaaggctttgaagctcagtaacacaaagaggagtggtgccattaacagaaagaggctggttaggatagaacagtccactctgcccaaagctcgtttacctgaactggtctgctgcccggtttagatgaattcatgcagagccagtcaggataaggagcctgtttatgggaagaagtagaaaattctgtttgtggataggttagattttcttctgataaagtttgggattttatttccttttactgtgaactgctgatgcaaacacttggaaatattcttaccctttttttctgcccaacaaagcagacaatcggaggtattctgattcaaacaaatgaattaaatattttgacttattgaatgaattcatttgcttctaatatttaaccttttctcccacttacacaccttttgcatttctgttttgtagaaaagctatcttagttgcaattacaaagtgagatgatagatgtaaaagtgctttgaaaattctaagagctatgcacatgttagtaagatcgttaatatctttcttaagcttgtctatgggaaatattttttaaaaagatattttacatttacactcatgccttatatgccagataattctcctcttacctgagtccaaaataaatattaattcttatactgtaattttatctaaggtgaattgtgtttgtgaggttttcttattctctatccatattaaaggttctctttgatatctaccaagctatttagaatgtattgctataatttataaaatggttgctatttttaaaacattgatttaattggaatgctatagctttccttttagttttgttttatgtatcttgatccatagatttcagctagagctaaaaccttaaactactcataaaacattaagacaaatatttagaatatatagaaatcatacatacacatacatatatgaatcatgtatatgcagaggtatttgtactttgccctagtttctgtttttggaatatgtggtggttctatgtgaccatccaaactaattgatgacaatttttcacacacaatcccttttttacatagattgcccaaaacatattttatttttcagactacagtttggcaattttaggtctaatgttcagaaaacacatttgaaagtggtttcacatgacccaagatggacatgttgcttactgacctgaaaatttttactcttggaaactagactactttgtgaattcaggggttttccagatttactttaaaataagtccttgtgttctgatgtctacttttcttcttcacacacatataaacacaaaaacatatacacattgcatgttagaattttctcaagttgatttttgtttaaggttctggctaacaacagatgcatttagacaaactgaaattattttaaaaaacaggagttaacttacgttacccccatttctacagcagtttagggaggtaccatatttatttcagtgaggctacaaaaactggaaatcaaggtaacttgtttctctaaacttccattagcagagtagcagcaatcttgaatccctctctccctgaagtgccttcttacccttgataggttctagatggctcccttcccttggtggaaacgtccttctgctgcccagacctcatttggttgatgagagccttcccactctctggttattgtccaagttgctctattgacagaggatttatcttcatttcccctctcttcatccctctagctctgccaccaatgttacaattcacaaagtatgcctgataaaaagttataaactcacgttgcatttattgtattttcacagacctctacccccaactacgaatttagaaaaagtttcctggagactagtttgaaaaatatttacggtggcaccactagatatcccataacaacccaccccagtgacagacaatttcaggaaaaccttgactctttttttctctccgaataagtcttttgcccatgggaaacaccaacacagagattaagggatgttttttgtaccctttcctcctagagcatctcagtgtttgagctaacagtcttttcaaagtatttagtcattgttctctgccaaaaggtgatcagttccttccgaaagacagcctgtgccaatagacccagacatgctagagtgcagtgtgcatggcggaacacacgcccctttccctcagtgggtcagcatggtcacctttggtaatttagctcagactattccagaaccattagatacaggctgtctactacaatatatgtttctttgatgcatattggctcctgtgtgtttggtaaatagggaaattatatcaattcagtgtgtaagtttttgtggttcatagatttcctcttgcatattaatgtttggaagtgatcaggaataaggtttctcacagctaaagagacagccataaaaaattatttatgaagaccttaaggggaaaaaattctcttctgcagaagtgtttttatttagtgaaagaaatggggagtttaccggctttaagactcactcactgtagttgccgctatatttagctgtctgaagaagctgcacgtgcatccaaagaaactgagaaggaaactgattgatgaagaaggccatccttggatcatacttttaattttggtgaaattgctctgttattagaaatgaatgtctccaaagacctacaaaaaggaaaacacaagcctatgggttttaagtttgcaaaggatggactgtcatacgaaatgcaaaaattagttgcaattttaactgtgctgattggttttggtttctttagggctctggtcccaaagttcctaaagtttgtgtggtctggtcattgtccctattttttttttaagtcctattgccctccctctctccctccctccctcccttccttccttcccgtattttttttctgaagtctttctttctttctttgttactttctttgtttctttctttcgcatacccttgcaaaacagagattgctaggactacatatacgaggcagaaatgcctataattgcacctaaaaggtaggcatagccagactgctgggcttagggctatgctatgactgctttgcataatatagccataatataaaaggaagaatgggagatattttctatattttagattaataatttacatgacactgtctagctggtaaaccaagcataaaccaacacttatatagaaggaatatcccctacctctccatttattgtagaagcagagcatctattctgaaaaatagacgactctcaatagacagcaaggattacatatggccacaatggggagaaacttggcccagtttagagccaggactcaattttgccatagtcggctataaaactccagatgacttcactctttacatttacacatgtagatctttacctctggaatatctggtaaaaggacctgcgttggagagaaggcaatctttaaaagtagttgaaccaggctagaggcagttaggggaggcttccttcctctcattctgagtttaaaattgacttcaactccttgatctataggaatcatttgtgacagtttccccatggttaaggcaagtcattggagagagctgtaaagcaagatcataagcaccaatttttttttcttcagaaaggattgtagaagtagtaatatgaataatggttgaataattgttatataacttcttgaatgcacttataaataagttaattatctttgctcattttaagctgaatatgtaaaaggtacacttggtatatcataaatagatttagtctttcatcatttttgcaagatacaagttgaaagtgctaagaaggaaaaagggcttagcaccaaagccaagctaattacatgagttaaaattatataaataatatagtttaattacattcagtaaacttttagtctgtccctgggaaatgacctgtagctttgcttccctcttcactgaatcctaggggagattccactcttcaaaatgtagctattgtataggaggtaaatcacatttttaatagcctggtgacttattttagaatgaaccctgccattttaatcaaatggaaaatattcgtgcattctccagagtagaaaggcccagtgagcgaactaaaaccatgataagggctctagagaaagatttgagaatctaaactccacattcttaagaccctggagattcacaagtgtcactttaaaggaaagtgttgtagtcttcagtagaaggatgtacttcaacttttgtgaggcaggagctccctccagagtccacacgtggtaagctgcaggcctgctggagtgggtccccatccaaggaagatatttaaggctgatttcttctcccagtgagattgagttggggaaggggtattaaaggaggacagagaaactctcttgaaagcttctattgaagtctgtgtaaacacaactacttaagaaagcagccttgggtattcttatttaaatcaaatacaaagaagaatctatctatcttctgggcagacaataatgtaacctagactagagtttggttggttcttgacctcatatcttctgtcattgtggtactagtctctggctccagggtcatatgccagatgttgaggctgatgagtggaagggctggaattaacagtgtgctaagggtgtgcaccagtagacatagagtggcccagaaagggttcagccctagtgtacttatttacacttgtttatatggttttcaggaatacttctcgatcacttcaaatgaggtctaagctgtgtcttccacttccacataattaactctgttgctgtgactgctgcttttcttatctctctgttgcagcagctgatggagatgggggggcctcagtcagtgacagtaaggatcagcagcatcactgtccctgtgttacacctatatgcctagcagtatgctgggtttttaaatgtactatctcctgtgcttataaccatactgagatagtatattttcaatttcactatatttttggatgatgaaagtgaggctcagagaactagaaaacttgcaggtcacgtaactcgaagatggagatcctgggactcaaattctggcatatacacccattgccttgttagggatgctaacagccaagaggttgtgttccagtttgctacaggacattaacttctttttacagggaaagttagaaaaaggtaaaaggcaaaggtttagtgtgtcattattgcagaattttttcttgcctcctaagacagggtttcacaatctcggcacttgacatttgggccagataattctttgttgacagttctttgtcctgtacattgtaggatgtttagcagcatctgtggcatctacccactagatgtcaggaacacacacatccgcttccacctccctagttgtgacaaccagttctccagatgttgccacatgccccctggggggcaaaatcacccctgattaaaaatcactgctgtaaggggttaattgaggtaatgttatgggaggagggtgtgacacaatgaaaataacagagatggatttataggattaaggggaagaattggaacagattgatgaaatgggacaaatagataggaagactttgtcctaagatgaagatagttgttagattagtggagggggttacatgcaggttcacaggctccatcatggcagatctgaatattgttggtggtagtacagtaatcattcatggatgcatttataactctttctctcttctccctcctcccgctttttttttttttaataacaaataccgggagtggagaaaaaagatccaatcctgctatttctctagttctaccttttggccagttggtggccactgagggcgtttcagaatttggtgtatatttgtccaaactttattctgagttatattaaactcattctcctcttgaattatcctccttatttcttatttccattacttggttttgttttttgttttgtttttgagagagagcgtctccctctgtcgcccaggctggaatgcagtggcacgatctcagctcactgcaacctctgcctcctgggttcaagtgattttaccacctcatcctctccagtagctgggatcccaggtgcccgccaccacgcccagctagtttttgtatttttagcagagacggggttttgccttgttggccaggctggtctcgaactcttgacctcaggtgatccacccacctcagcctcccaaagtactgggattacaggcgtgagccaccatgcccggcccatttcttgtatttttaattagaagaattgctaatacctgtggggggaaattatttgaagtaacaagaaaaatatcaatcatgcttattttattaaccttcaaagacaattttacagtatacttatcaggactattataagaaattcacttataaatattgtagttacataccatcgaatgccagaatgaattatacaaaggtaaagtacgtaacaatactatgagtccttgctcagtgtcttcaataggttcaggaagaagatgtacaatgaagctaattttaccataggcaaattgatattgttgactgaaggaaaaaaatttaagcttttaaataattaaagttagttctatttggaagtcttactgaggactatagactgaggcttataacccagaagcaattctgtcaggctgttttaaggcagtattttagtttatggtttacatgtaggtggtgaagatttaatatgtgtaaaattatatctaagtttcagtgtaagagtatatttggtgataggttatagaagtataatcattaattttgtcaaatgttattttatgtataggaaaagacaaggactaggatcattgatcttttaagaaatgtagtgactgaggcaagagttgtggtggggccatgtgttttattttgttttgtctttaaagtattttttacagagctgtatgtcatcactgaatcaagagctttgtgaaattatgttggcaagtagaaatgagcatgcctttttatgtttgttattgtgccttacaacataaacaagagtcaagttcctatggcatgtttctggtcacaaaaatatcaccaaacttctaagtaaggaccaaaatacttctaatattaaatattgaaataaatgtgaagtatgcatacatttaataaatattaataaaaacaagtaagatgatgatttactcaatttttggtgaacccatgagtgatggtactcatagtggtggtgaatttaatcaacgagtaaacgtttacgaagcgaaaattgtcaggagtaccttccaccaccatgcagttcaaaaacaagcaataacaaatgtggggagcttgctgagcgcttctgtcccacatcatttattgtcctgcatctgtataattgtcgtctacattacacatttttatttcacagtaatttgtatttattcatataatttgcaatccactcattccagtttagggtggtgtgcagccagaacaaattctggctgctgaaaacacaagatgggcaccctccctggccaggacgccatcctatcacaggtgtactcagacacacccatactcattcaccctaggctatgtagacacagcatttcacctaatgggcacagcttggggatgtatatccagagaaaacccatgcagacaagggaagggtgtgcaaactctacccagacagtggcatcagtttttttttgtttttttttttctcatcagcattaaaacaaaacaaggttgaatgaggcaatgttattcaaggacctgcactacacttatttaataacttggcttgtcagagcttacagagcaccctttaacgtgcttaaaaaatagatagctacagctgggcatggcagctcacgcctgtaatcccagcactttgggaggccaaggcgggtggatcacctgaggccaggagttcgagaccagcctggccaacatggtgaaacctcatctctactaaaaataaaaaaaaattagccaggtgtggtggcacgcacctgtaatcccagcttctcaggaggctgaggcagcagaattgcttgaacccggaaggtggaggctgcagtgaactgagactgtgccactgtacttcagcctgggggacagagccagactcagtctcaaaaaaaatttaaaaaataaaaaataatagatagctgcaaataattaggcttttatttatgtcagttaactatcaaaatatacaacattgaaattaaaataaaattttaatcgttaattcatttaagaataataatttcattacatattacatattttatgaaaataatttttttaaaattaaaagaaacgagtatcattgtcttagatttttaccaacttctgtaatgtctggcttatagaagataactgaattccaacacctacctctgcattcagtctatgcccctgggttgttttagttgaaatatatgaagaaaatctggcctcactcagatatgtaattgcaaaaggggggagcattttaatagcttttttcaagtaattgtggatactcctttttgatactgtactaaaaactagtggtagttttttaaaaaagtagctgcaatatagaatctgaaagcataaaaaagaacctttagtactgtttctagtctgtcttgcactttaacaggacattttaccattgtatgatgctgtaatatcaggagttggtcatttggaaaatattggtttcccaagtaatgcagatcttttaaatattgacaatttcattatataatgataagaacaatacatttgttaacatcatcatcagtctcattggaaaggccttaactcctgagaaactgtcatatttccaaatttcttagtttcgcctgagagctcaagttttgtcattggcaacaagtgatgtcagttgtttttgttgaagtgacaggctcccttcattcatgttcaaaaaacttccagataaccaatctcagtgaccatagtttgtcctttgtttctttcaagtgaaaatggcattctattaaaaaataaatcataaaaacttattcagcatacagatcagtctcagacgcttttccttgacacacccatcatagttgaatatctaatagaagtctttcatgcatacttcccatttcgtctcacagaatattaaaaaggcatacactcaagggatttaataaaattaataaatcttcatcaaggaagacttactgcttcatcaaggtcattcagtgtaagtggtatgtgttttatatttagggtatatttatgaaggtatattaagtatattagggtatattattatgaagaataacttaaatatgggtaccatttggtgtcattgccttgatttatgctaaggcaccagcagttttacccactttgctttggtaccatcagagtaaatatccacacagtgaaaaagatagtatcttcatatgatcagcaaaataattttgacctcaccaaacttcagaaagggccttggggaccccacaaatctgtggatcatactttgaaaaagccgctgctatagattttagaatgaagaaggtgaataataagtttcctcagaaaaagtttgtcatcagcagtcttccagtttgattattgacaaatacagcattattttataaagtaaaatttaatctcttatacttgatttactggtaatttcagagattctgtgcttagtgatgatttagataattaagatgctcacttactcaaaattgtattgagctctattttaattaactgatacagaagaaaaacttgattttatattgcagaagtgcagtcaacatctgcacaaacatagatggccggatagtatgaaatcctatctctacactaattacttaggattgatggataaaataatagcaaatcggccagctttaatattcctgggactaaaatggttttaaatggtatagggcaaccagcctccaaactggaaggagtaatttattttaccatcatcctattaattaaaattaaaggaactcatgggaacaaaacccaagggttcaaggttcatcaatttattagttgggtattttattataatatcagtattttgtaatgattgcttttggaatgccaagaattcattgaacagggttcccaaaagttgtccatattttttaaagtctagagatagtgctaagataaatataaacacatcataaaataagatcaatggtatttacatgatgaatacctgtggtcagacattagtctgattacctaggttctaaactgctagctcattggtttggaacatctgcaaagctattccacgcaaagccttccccctttagcaagttacttttatcaataagtagtgatatacatagacaaaataattgttttaaagttagtcttaggaccaaattttcagtaggaaaataatataccaacctgagggcatatttcgatttttccaccccctccacccttcccttttcaaaagaaaaatatctgctatatgatacctgagtaagcagtaacttactgtttgtattctaatgattgtaaaacgttaagcagatatataatggaatcagaagaattcacccaaagccagagtaactaagatatgagtggttatgataccaggcaaaatgttataagacaaagccaaccttgcaagatgataaattgtcttatttttcccatcagtgtccattataaggtataatgtgtgagtctacacactgtggtgttgattcttgtatctctgtcccaatacggtgtgagttctctgagcacacagtagggttagatgggtattgctcttccgtattatcctctgagtctcaattttcttatctgaaaaagagggagtcgtcaatttttctaacttgttttaaccacaagaagccccagaatcctttttcaagtgacttcctaggcaactctatgcttttgttcttggcaccttctttaaatccgtgggctcctccaacaagtttggaaacctgagacctagatgttttcccaggtctctctcattttaaaattaagtttttctgtgtttctacattctcccctgggtgttccacaattgtttctctagataaaaaagctgaatagaaccagccagcaagcagctggtgtgcagctgttatcactcgagcctgaactttgtggcatgctttcttttgtggtattgcctcttcctgcatcctggaggggggagtggcttcacagcccttgggccactgccaggtgcgacagctctttttggaaaataatgatagatgtggcatctatttacttggctacctagtattggtgcagaagcaaatgctgctttgatcccagcactttagcaacttgcactgtttggcaaaacttgcgcttcatgtacaagccactcaacactgtgcccatcctggcaaggagagcatcagacgcagccaggataccaggcttgcccttcttcggtttccccaggagcaggcaggggaccagatggattagctggaggacagtcagccattttatattgccaagctcaaccatgctagcatttccaggatataatcctgttatgagaatgtcttcctctattagcctttgtttgtgccagctccaggggtggaggaaacccattttgcctgacatactaagaagtgacctttccagagccagctactgtttggtgaatagttgtcatggtctttccccatatctctgtatatacattcatgacttttagaacatagaaaacttattttttgttctaaaagcttatcatcccgtatatttccttatcctttacccttaccagccttctctacatgacctcaggtttgtgacatgtttagctcaccacctagcacatggtaagcagcaagtacatgctagctgttttactagcagtgatggtggcgtaagcatctctctctctctctctctctctctctctctctgtctctgtctctccacccccaagaccccctcattccccccaatctccctccctcccccaccccccaccctgtctctctcccttcttccttctctgaagcaatatgggattgtcttgaatttcttccacatgtcttttcagagtttttacctttttcatttcttttttctgagtctagcgctttgctttcatctcagtcttcaaatggcccagataaactgcttatcagaatggatgggagcccagtgcataagattgcactttgggagtcacatggtagcttttaaagggaatggcttggacgcttcaagaaccttgctcataatatattaaatgtgtcatagaattttagaactggccaggctcaatggctcatgcctgtaatcccagcaccttggaaggatgaagcaaatggatcacttgaggccaggatttcgagaccagcctggccaacatggcgaaaccctgtctctactacaaatacaaaaaaattagctgggcctagtggcgtgcggccatgatcccagctacttaggaggctgaggcacaagaattgtttgaacccgagaggcggacgttgcagtgagctgagatagcaccactgtactccagcctgggcaacaaagcaagactctgtctcaaaaaggaaaaagaaaaagaaaagaaaagaattttagaactgaagggggccagaggggttccttggtactgtgagagatccctcactttgtggataaggaatcccaagtataaacagtatgtgatcatccaggattaaattaagtggctgagaagaatgaatccaggtcttctaggaccgacctttcactataccagacaaaagagcacgaaagtgtgttgatcagagcagtagttttaattgtagtatttttgatacatttgtgaaacattttatagtaataaaaatttttacttaggagcaaaagaagtatgttatcaatcccaaggtaactctttttaaatgtggacatataaaattccaattatatgtagaagggcctctgcttaaatctaagttgtaagaagttatactattaataagagaacagatataaaaataataaaatcctgccattttcggcaacatggatgagcatgggggacattatgttaaaaataagccaggcaccgaaagacaagtattgcatgttctcactcacgtggaagctaaaaaatttgatctcatggaggtagagagtataatgacggctacctgaggctgggaagggtgtgtgtgtgtgtgtgtgtgtgtgtgtgtgtgtgtgtgtgtgtgtgtgtgtgtgtgtggagggctgggatgtgggataaagaggggttggctaatggctataaacatacagttagctggaaggaataagttctaatggtcaataggacagcaggtgaccatagttaacaacaatgtattgtgtatttcaaaagggctagaaaagaatatttgggatgttcccaacacaaagaaatgataaatgtttgaggtggtgcatatcctaaataccctgctttgatcattacccattatatgcatgtatccatatatcacatgtatcccataaataggtactattatcatatattaatttttaaaagccaccttagtatggcctagaagtagaggatcagtgttgagggtatgggcaaaatttaccattgtaccatgcctgtcacttagatcaccctccagcctggcccctgaaacgcgtacctgaatgctagggagatacactgaaagagcattccattaaaatgcctgtcaaactgaaggatggcaaatttctgtacttgagggtttgtggacacccataggcagattaccagccagtggcttctgcagcgccaggaaaccatgcctgggcacagaccagcaaatgtcatcagcaatggccattccttagaataggcacagcagggggaccagcttcacaggaccaggggcccctttgcagcagagtcttcacctcagcaagcagagctcacagaaaatgaggggtgctgcatggtatccgagagtgccaagttcataaatacacatgaggttcactttgggaatcccatacagagctgaaagagtgatgagcatgatattgagcatttagggagctttggtttcctcttctagcaattgtggataataatacttggcttgtaaagttattgtgggtaacaaatgtgctaaaggacataaaaggcatatcacacatgagctccaccggttggaggtcacagttgttggaggccaccttcatcccttgtgtggcatagagaagcttcagaagctcttttttctgtataggcctctcatcatgccaggtgtgtggtattcagccttatctttaaaatatggtaccctcttcattgtatttcatcctgccgtcttactacaaaagaggaggagtcctaaaggaagttagtaaatacaaagaagttcttaaggtcaacctaagataaagaaatgcttgcttgtaagtgctgggtgattgaatctataatttgcgtcaagagaagtgaagaaaaatgttagggtggtgcaaaagtgatcgtggtttttgcaattttttaatgacaaaaaccacaattacttttgcaccaacctaaccttgttttaggcatgtatctatttaaagacactttattttacctataacgttgatgggtttacattgaactcagggccaatagcactgtaactcgcacccaaacaaagcttgtctcacgtggattttctgcacaggacacagcacagcatctttgtgcttaggataccaggtagcacactgacattattctcgggaggctgttttaaacagcaaaattaccaactaaaagcacaaaaatgagaaaatctgtggcaccaaacaaactgcaaataggacacttgttttctctctcgtttttttttttttttttttttttttttgagatggagtctcgctctgtagcccaggcgtggcgccatcttggctcacagcaagctctgcctcccaggttcacgccattctcctgcctcagcctcccgagtagctgggactacaggcgtccaccaccacgcccagctaatttttttttttttttgtatttttagtagagatggggtttcaccgtgttagccaggatggtctcaatctcctgacctcttgatccgcccttcttggcctcccaaagtgctgggattacaggcgtgagccaccgcacccggacacttgtttactctatgagcagaaacaagaaacagaacatcctcgtgtgcatgcccatcaggcatctccaattgcaatccacatttgtggacgtagaatccacaaataataaggagccactgaatttttgtatatttagtatggggctcaggttaatcacagaaatatttactatatagttagtgggcaaaatgcccagtaccccattataataaacccaaatctcagtaacagtgaagatgtttctcagaggggcatggctcctctgatgtttgtcagataagcatgtcttattataggggcactcagacaacagaggcacagaacaaaacaaaatattttttgtctgttaatttatttcaaaaatgaaatctgataatggcttttagaaatgtgaagaccaaaaagcatcaaattttgtttttccatttaaggaatagaaataaagtggccgagttattattatatgttccgcccataattcatctttccttgctccttcccacccctccccactttatcttccacctccttttatagatacctaactgctaaaatgggcttgggaaggcagctggaatcatgccaaggtgtacccaacagaagctgctgcagttagtgacatgagctatggaacacaggaggtcttttgcactgattggaatatttattagatttagtgctgaaatagtctctgctgataagcagacctaatctgaatttcaaaggtccttatgaccacgtaaatgtgatagtatcatatcctcaggccccaagtgcatcacctttcctaaatggttggatgctgtattgaatctatttaatatcctggtaactagctttgacttttttcaggaatacttaataattttagatttaatcttccctcctcctcctcctcctcaacagaagtaatttaaattctttccaagtagtcattgcacctgtttcttacttcaatcttggtctcaaagaaatatacaacaaactccgatagaccacggccataaagtccaattttataatcatgcaggaaaaggaatgcttcttgaggatcaaaagttgcagtcatgatgctaggatgtttcatatccagtaaaactagagacaccccacctcatcagctgattgtgggagaagtcgtttacaaaagtcctgtgaagaaagaactagatgatataaatgtatgcatatttctagaacctgaaaaatataaaaagataatcaagtgtacttggacccatagccactggttttaaccattctgcagaagtatagcgcaattattattggcaatatgtgaagatatggatgatttcatggggaaatctttgaaattaaagtgggataatttggaggtacaggggaaatgtttttccctttaaactgtggcaataacccttgtaattgcatgtgctctccagaataaagatatagcagattgacatcagcttcagaaaatgagacattaggtacctgagggattcagtcaaattgctcctatgaaatcttgagttttgaagattgaaaaaaaaatgcttgtttttgtgacaagtgttttggggaatattttaggggataattgatgttctgcattccaataccttaggtaatgaggaagctgtggaaacagcctcctttcttttatgaaggctttcgtattcaagatcaccatagaggtcagtgctgtgaagctaatcttggacgcctatctcaattgcttcagagtatttaggatttctaaggtttttgatggatttttttcatcaaaagatataatttttcctccacatgaaatgctttaaagtggtgataattaaacatatttactcagtaatatttggaacattatactggaattcagaagctctggctttcctctttggatttataaaccaccaaaagttggcaactggcccttgtaaaagatttcttccagcagagctcttgtatctttgtttgtgttttcctttcccgcttaagcacatttatctttgcttttagctgctgcagccctctgagaaacagcagtcttcttggcagctgcattctgtgcaggctcctgctctatcagtatgacagctatctagaaggactatatattagatggaataaccagctgatatcagaagggaaaaaactggcagcaacgaagcacaaagttcccctcagtataatttgcaaatctttcaattaacctattgaatcaaaatgagaatgggtataaatagtaatgatttttaaaatatgcccttgctttttagaatagatgcattttcagcaaagccatctgcaaagtgaatacgaaaatttggtctaattctgttagtaagttgacattgttgttctggggaaagctttaatgtattattttttatgagaataaaggtatcaggctagattttttgcccaggggtttgctgattatgaagctgccagagtaatgttccattcacttgtagttgtcttaagtagcaactttaaatattttgaaaaaaggaaagaagtatttatgtttagtagaatatttaaaggaagaaagtaaaaacaatcacctgtaatcctaccagccaagtaatacatatatttatgttaaactgtttgtttgtttgtttatttatttatttatttattgagacagagtcttgctctgttgcccaggctggagtgcagtggtgggatctcagctcactgaaacttcctctgcctcctgggttcaagtgattctcctgcctcagactcccgagtaggtgggatttcaggtgtgcaccatcaggcgtggctaatttttgtatttttcgtatagatggggtttcaccacattggccaggctagtctcgaactcctaacctcaggtgatccacccacctcaacctcccaaaatgctaggattatagatgtgagccactgtgcctggccccaagtagtatattttaaaaatatgaggtcattttaaaagatgaggttagatgttatatattatttctaaaattttattaaaattgtttttacacatttttatgtatctttaaatattttttgtgcaacaccattttgctagctatatgatctgctgcatggatgaccacaatttatttcatccatcctttattttgggacatttggattattttcaggttttcactattgtaaacaatgctgtgaggaacccgcttatggctcagtctttgtgcccatcattgattatttcaagaggacaaattcctagtggaatcactaaatcaaaggattaataactggttccttttacttggtagtgttttgtcaactctggagtctctcctctgctctccatccctgtccctcactgcttccacttcatacagaatatatttgttttgcccttttccatttttctctttttttgtctcctttggtaatggtctccccctgtatatggactatctgtagaccattagaaattgagggactctcaagagagaatgcaacaaactgatactatttcaagatgacagttgaccatagcttacatgcagtgttcacatgagttaagtcattgggttccctgccagattttaagtgaactaaaatgttttctaaaattttggtttgagattttctggcatctgcctctttcagagtgagaattaacataccatctcagttgttataattccatcccatctttgagccataaactatttgataactaacttcaactcactcttcgtgactcactcgcctcagaaagatttgattttctggaaaattacaatgaagcagagatgtaaaaagataagtaaagataactcaattgattccggaaatgaggtagactaccgcaataattttttgaaatagtattaccaaattttctcctttacaacgtttttaaacatctcatatgtatcaattatatgctaatgaactacttgtttcctaatatctttaacaagataaattactaagtgtagccaacatatattcttactaaccccagaaaatgtctgttctgtgagttaataaatgttaactgttgtatattacatactcttttccatatttgttttacagtggagagggtcttcaaaaaacgatctagtacatctcttcattttgctatagggccattactatcaatgtttaagacttctgtaagtaaatattacaacctgtcttgcaaccaatcctgtaatatctaacaattctcttttgagaaattatttactaactccagcctaaagttatcatgctgctactgtaagactgtacctcttcagtcattaacagtgttgaaatttgcttttggaaatgtaagtcctccatatggttgatgtcatttcctcattgtaattagagtacatcgagaaggcatataatcactcactgagtgatgaaacatggattgggagagatgactcaataaacattttaaggaatgtttgtaaagtgtgattttcaaatctgtgttgaacttaaattcccaacttgttctctgcacaactgttttttactgacttgcaccttggtacaatgccattggtctccattgaagtctttatggaaaacagcacagtgaaactctttactgtgtttaccataaggaggcccctgttgttgttgtttaaaaacaacaacaaaaaatcccatccgatcttcacgccatgaatattgtacttcttctgaacaactggtttgttaaacacagacctcaccaggttttcttgctagaaaattcaagccaatattgtgatttacccataagaagtatttggtatacccaacccaccatgctactcacttggggtggtgcgttcatagtgtgctcattgtcagtcgtaccccagaactgtgcacacaggagcccttgaccctctggtatatacttctaaaacctcattcttgattcctccttctttttcctctcattctttctttatccatctttttccctccttctatttttaacttttgtaatactgttttattctgtgtgtctttgtaagctgctcaaagtccttgtggaataaggtgtagcataagttaataactaagtcaaaaatgcagacctttatttgctcagactgttaagttatctatacatccatgcatggtgcccaatgttgatccttactcctgttgtttcagctcaaatatattggtgtttgataagctggtacttctgtaacacagaatatggcatgtaagctcatatttgaaatgagagtccaatatagctataaacatatggcttacactgtgaaatgttctttttttcctttcccagggagttttgaagaaatatacaagaacatatgtccagtcctaggaatccctgccagattttttttctctaaattgtggtttgagatttcaaatcattaactggatacatctgtctgagtatgttttccttttcaaaaaaagaaaatttgaaaatagctacccaaaagacatagttcagtattcttaattttccataacatagttagtatcctcaacctttaaaattaaactgacattctctgagctgtgtgcagtcattttgttggtggccatgtatttcctgggtattgggtgaaaataaggaatttattttcctgtatgttgtttaagcatatatttgtgtgtaattcttagtaaacttgtaggtttaaggaaagagccttcaaattagagtcaaaggattcatttttaaatcttgctgctgtcactaactgtgtgactttaagcaaatcatataacctaacagagcctcagtttctttatatataaaatgaataataataataatgcctgccctttctatttcacagggttactgtgaaactcacatgagataacatgtattaaagtgctttgaaactaatagcagagctattagaactgcattgcctcagtctgggataaaaggagatcacaataactaatagcaaaatcaccatttatttggcttaaatactatctactctgctagaattttaactccctcaaattcacaactagttctgggagtcagccggggatgttgaacatatgcttgggaatggatcctgttggattcctcatggatgctcatgtgccttctctgtggctcactgctgtcgtctcctctgctgctcttgcagccagtgcttagtgactccacggtcataggacctgacgcctctaatgtcctcaccaaaaggaaatacagtcatccccatgcagccactcttaacaactgtcagctgtgaagttctcacctacatcttctctcatggtatctcaacatggggagcataactttctcatttttgggggctcattaggacactaagtgaggaggagcatcaggggatggctgagactgaggtgttctctaaaactgtattcgaacgtttctgtcccagagtttatacacattatttaaggttatagtagagactgcaagctgaatggtccaatgacgatgtgacctttaagaagcctctggcttccttcgtgaattctaaccgtaccgttactgtgtttgaggatcactggcagccgagctctgagtggggaactgagataagaaaggtgttgtcatgataacacctggacagctgcatcccacagactatgggagtgccaggaaactggctacctcacagcagagtagagaaaatggaaataaacacaaatataagcttttcagtgagctgtgggtcagagaaggccacaagtggtctggcagatcatggtgcagctctttgtttcatgagctacgtgcagcagtagtttttatgagctctttttgtagctttccagccctaggattcagccatggtaaggtggaaagtttctggtactagccctgctgttctgctaacaatggtccactttcctccaaacccattgattatttagacatgaaataaatctatgcatctcaactctctgcctcagaaaatgaaatctgtcccaggaaaagttcagatgcagtaacctgctaggaactagggatgcttgtcttaaaaccctacacacatggcaaacactgttttatttagattgagctgattgggaggggtggacctgatagggatatgggcatgatgagctaaagccaccaactggcgctaccttcaaaaatgggtcctaccttccaactatggcaccatacagtacactccaaagcaaggattgtagttaacagccatactttcttaattatctagtttcatcctgaaaggcagacccatccattaattccatgagcattgattttgactttcagccttaaatagagcaacaagtaaacattttttattccccttttcattaatatttaattcattaatgaggacagtgggtaatgttctgtgatatagtactcgtgtgacaaaggagtagtcccaggaaaatttttggaatcaaatcaacaagtatgtattgagttttgacataatacatgaaaatgctgttttggctaagagcagaacttctgatgattagttttgctgacattttaatcttggagatgataaggtagaattataggcttaattttgaccttcacagggattgattgataataacattggaaaaaggtaactaggttatcttagagtctctattagccaaggaaaagaagagaaagtcttcaaggaattgaggcattgtttgagaaaatgattaaataaaaaactataaccacagttttattttgtctagttaaaataaagaatatatagtattatcaagaaaagaatagtctacatgggggttagaataagggaacctaagaaaagatgtgattattgtaccactagctatccatcagagagggagcttgagtcagtcagtataaatttagtctgttcagcacaccctattgtggaggaggaagcagggagcttcaaaactgtaaggcatcagccattaaaacagattctgtgtttgccaagcaaccttctcattgtgaccagagtttgcaggcagagtttccagtgatgactaggttgcatgaaaattttttttttctcatttcaaacagtattttatgtatcagcttcttgtttggtgagcatgtgtaattctcttaagtttaattaattttgcatatttataacaatttttaggaccttccaagtagtaccatctctgtctctagcttaccttcctgtaacttcaacaatgaccatagaggaagatctccaataatctcaaatttaaagagacgatagatagattgattgatagattgattgattaaaacttagtgaaaagctctcagtttaactcttagttcattaatatataataaactaaaatttacaaaaatatcaagtgtagcgtttagacatggattatttgcccataaacaaatctgtttaactagtttaaccttaaacaaaaaaatgtggagcggggtggtgcgagctactagttgaaaggatatatgagtatctcatagaacccaaggtcaggaagtacacatggtggctgtgggagactcggaagtacaaactgaaaagttgagaactaaagtcacatgctctgtctttctcagagttcatgaattctcatctctacttctttctctctgcttctgcatgaaaatagctgtccagtccttgcctgacaatgcaagagcctagtagaaaccaacaagagttccagaagctcagagtttgcagagaaggactctgattggcacttctcaaacaggtgtgcactctgagtccattttgatggcctagggatgacgtcacatggttgctttttcttgggaactgctgtttaaggagattcttagagaaggggacctcagtagggccaagtgatggaacagctttcagaaaaacaggagacattctagatatgtattccaagtgttgtctgcaacgattaaaaaattgctttaaattctgttcagagtaaaataatgaaaaagcaaagagtaggcagattattagggcaaattatatgattttaacgtatgagaagaaagacagatgtgcaatacttttttgtttccttcttagttatctgcaggagtgatttccatattgaaagtattataactgacatcttaagagtgcactagatttgttaaagcctttaaagcctcttacagcaccagctattgaggaacttgccagatgagtttgagaggaagtactgtcagtaatcctcaggtactggagagaagaggagaaattttaggaaactggaggtgggaaaatactaccttatatttttcaaaggggagagagaaaacttgttcttggaaacttgtcactgatacacagtatttaagggagatcatttaaacatatttaaaaagtagccatcactaggtaccagcatggggctatgaaaaagagtcagaccaaagtcacagctacacctaaaagaagacatgtgtttaccttagtagaccaggagactgtgtgatagatacctcctgcagtgtgagttagcaagatatttgagtaaagtgttcagatccccgtggagaagagaaataaatatagtttgaatgatagtgcaattaggtgaaattgataaatggagtgatatcaacctctcagggaaaacacatagctttaaaacagtatttgacctcatattcctccatataaacagtagataaagtggaatcatattagtccaattttcaacatagaaaactgggagggatggttatacacaacaaatgacaaaaaccaaagagggcagaacctgctggaacatgcacctaaaccaacaatataaaatgcaataaatgtaaacatggtattttatactaagttcaactgctgaaatataaaatgggaaacattggacttaacagtaatttggggagaaaaattttagggaattgtgagatagcaatatgatatagttgcaaaaatacagtgccaatataattttagattatacttttaaaggaattatatccagactaagagttgtagcgttgatctcatatattgtccagtccacatctgaattattgtagcagtcctttttgggaaagatgttgacaaaatggggcatttccagagagggataatgaggaattttaatctataaatttctttcgaagcttagattttttattttgctatgtgtaatgcactgtatggaataaaatctaccatactgtgttcccaaggagcatactttgtgtcattccaaccagtgtccatagaaactgaacacttgggtaaaattcactcccctcagtctattgattctgataactgggtttaacagtgacgtattaggccattcttgcattgctgtaaaggaataacagagaccgggtaatttatgaagaaaagaggtttaattggctcatggttctgcaggctgtacaagcatggcactgacatatgcctggctttgggggaggcctcaggaagcttacaatcatggcagaaggcaaagggggagcaggtctcacatggtgagactgagagcaagagagagtggagggtaagctacacatttttaaacaaccaaatctcaccagaactcactgttgtgaggagagcaccaagaggatggttctaaacatgagaaatccgcccccacgatcaaatcacctcccaccaggccccacctccaacactggggactacattttaacatgagatttgtggggggcaaacatccaaactatatcaagtgataaactgtcttttcactgaaaatgtatattgatttctgaatgctaaattaaactttgtattctacattagtaacatattcaagtgtcagcactgtttcttataaattgtaagcatttttccacttccttttatgatgaaaatgagcaaaagaggttttagatgaaagcaggaaaggtcctcaatttattataaaataaaaatggaggccgggcatggtggctcacgactgtaatcccagcactttgggaggctgaggcagatggatcacctgaggtcaggagttcgagaccagcctgaccaacatagccaaaccttgtctctactaaaaatacaaaaaagttagccaggtgtggtggcgcgtacctgtagtcccagctcttcggggggctgaggcacaagaatcacttgaacccgggtggcagaggttgcagtgaggcaagaccatgccactgcactccagctgggtgatagagcgagactctgtctcaataaaaaggaaaaaaaaaaggatagttaaaaaaaatcagtgtttctcaaattgaggatttgtttcctatgcctaaagaatcttcctggttatatttacttcagaattaaggggagagaatcaaaaatgactctttgtcttgagactcctagtgaatggtctaaaagtaagaaacaacctttaagaggagcgagagatgagtaacttccacacaccaaatacacaaaagcatgcacacacacattattgtagattaatgatagtgtatattgagtgcagggactcgcagcctcaaaatgttacgtttttcatagtctgctgaattagatattatttattgatgaagtctaaatataacaaggttttatattaaactacagatgttaaaaacatagctgatacagagaaaatgcaagtgagacatttcatttttatttttgaaatctattttttaagttattggaaaatcactatggaaattcattattctcatattttctgctaatgccaagcacctgacccagatagctaccctgaaaatattctgtaaaattactctaagaataactctaatcattgcaagcctgtaatctgaatgtgagtatatgtgatcagagcagttctacaatgtagctgaaccagtactgtccttggtgttagaggattttaaagctttcttgggaaatgagataccaaagaggagaaattagtcaaaaatatatatcagggcccatccatttaaatgttgtccttcttattagaacttattacaaattctacaccagtaaagtgagaggaatgatgcagaatagggggttttacctcaatacaatgggcatttctttcttactaaatcttaatagcaaggctttgtgtattataaatactacttctgtgtgctctacccagtggcttcatctcacagtgacaaaccagaaaagagctaaactttaagatcctgccttcaggttgacggtggcaaatgaaagcttgtaattgaaggtagctcaatttgtgttgggctgaagctttcatttgggataagtgtccaatccagtcggcccaaaattcagactccctctctgggctgtttctgtgctccagagggtctcttttcctctcttccttttctctctagcatcctggtgacaggaggattgtgcacccttgaggaacatgttttagatggttctggcctgcttacctctgtctctgctgcctcctcctggttctgggtaggtgtgcctgtcttcccgggtatactggcaccctttcatctgctgctgaaggaacccctgctgcagtaacttctattcagttctcttgctgcctttgggaccaacggtcctttcctcaccagacccactatggggacttatctccattttggccctcactggtactgtggatcctctgaagcccgcttgtctacaagagcctgtcgtgtcttaagccttccatcccatagagttgccacatgtcatcctattccttattactgtgacccctggcaggccactggctctcaactcttagctaccatccatgttccccactggaagcatgtggaaacgtctgggctccctggctgcaccctacagccaagggagactgcacagcagatgtggaaagggaagttgtctctaggtctcctgcccaagtacacttcagcatggtttctctttcacatggcaaccaccttctattggatagtctcctccaaagctgggaaatggaggctgcgcacaaatccgttccttcatctgcttttgttaccttctatccccttgttccctccagatttcctacctctccctagtagaagagcttctacttcccttttctgtggaagaggaacatgtcctcctccacagaatgtggagccatgtggacttaacttgttctgttgcagttttgccagtgcaccttaaagtagcggtttctcgttgtctgaacaagtacccggggttctttgtcctgcatccaaaaaaattaaggagcatggacacaagggtgggggtggagtgaaagtttaataagcgaaagaaagcacttcgcagcggagaggggagtccgagtggattgccgagttacagctgactccagaagcttttataagaaactcttctcatctctgtagcagtttgagtaacttctcctatcagtaaagctgtctgtgcaactccccttatcttatgcagctgtgggtatgtctctaggcaagcacaaagcgccacttctcttttctgtataactgtgggtttgttttaggtaagcccccgtcttccctgtgcaagtttctgtggagcccaccatgtatatgcctcaaaaggggaggaaactttttcctgggagcttgctaattatacgaagaacaaacggcttcttttctggacgctgtctgcttctctgtgtgcaggtgcagcctgagtttttgtcccagattgttttgtttttgcccattgctgtgacttttcaggcagaccgcttctacactgtaagtttgccccaactgattttttcttttccctcaccctcattccccacttcagaagtgggaactctaactgctgttagggagattgggcattgatctttctggctatttcttgctggagaggagcattgtgtgaggaacagcagctaggattcctcccgaggctggtttaagggtcctcagaaaaaaggtgcgtttaatgtgtggttccatttactttaccatttggagcttgatggcctctagatgaaaaaaacaatttgggttattagacaacatgtattaaaatgagacaaggaaggaggtaaggatagcttaaaaatcatgaggctgctgacatgccctgataactggtggctatagttaacgtctgttaagattgggtgtatggggcttggctttggttagcttccttggtttgaccttccccaaaaaggaaacctccaggttatgggggcactttatttactcttattacctggcagaatttgtaggataattgcccagaactagaatattgttccagattttgacattacccatccctttctgtctctctgagctgcagccagagatggctggttggtttacaggaataagcagggttagtctaaaatgtaggcaagaacttaaaaatcactaatgagactagaaattaatgaccactgtatgataagttttgaaacataatttccctctctccagtcctcctttttgttaaaaacaaatcatgataggactgagttgtttgcaaaatagactttagttttaaacttggtctgattatttacataagtgcagcaagaatccttatttttacataggccttttagattggctttgatggaactttgttccacaaggaatcttagataggactttctaaagccgatctagacgtggtcatgcctctaatcccagcactttgggagcccaagacaggcagatcacctgaggtcaggagttcaagaccagccagaccaacatggcaaaaccccatctctatggaaaatacaagaattagctgggcgtggtggcaggcacccataatcccggctacttgggaggctgaagcaggagaatcccttgagcctgggaggtggaggttgtgagccaagatcatgccactgcactcggcctgggcgacagagcgaaactctgtctgaaaaaaaaaaaaaaaaaagaaagtgacattctttactcaccacaggttaggaaccctgtacaggggctgtgtagacaaggtatgaggccggttttccaggaggcttttactggctctgcaagtcgaacttgactctttaaagggaaacacaccctttcagtcaaagccttggtaaaacaacgagtttttccaattgtgttttgttgcaaaataaagtagattcttattgcgctgatgcaaacaactatattgttataagtcaagaatacttacaaccagtttctgaattctagagaaaccaggcagagagaaacaaacatgttccaaattttgttcacaggagtataccttacttagttgttaaaagctctagctaatttgaaagaaagtttccttgactctgaaaaacaaaacaagaattagcagtgttcaaagcaaaaatcaaaaagattcgtttagttttctattaggttagtccattccattaactcttgttctgcttaatatttgtaaacatttcagcttttcatgagtcctttacatttttctattatcagaaacctgcattcaagagtacctattaaagttccacagtgattataaaccattttttgaagaagattaaaataagacaacaattgtctgtaaatgacaaaatgtccagggtggttacagtcaagaacatgattgacaaatttggttatttctgtggcatacaataacccaacataacaaccttaattgtgattgatagcaaatattcagacattagaaccttagacatcccatacaattttggacatatgttaatatttttccctaaaacataacctgaagaatattagacctcattttggcaatcccatgtacctaaacatgttaaataatcctgtttacctctcttcagcatgctccagggaccctttgtagcacccaaaagcaaggggccaggaaagacaaccttgagactgaagtttaattttgggaagcctgtgaaatatgttagaggcttaaaacactggatattatgaaataaaattttaccataagtcatttgttttgccaaaacaatgactcaaaaatttgaaaaaaaaaacaacaacaaaaaaaaccttttcattagcccttattactacatgaatagagagccaaatttacccttgcattagtctactattaatgttaaccccagtttttaatgaagccttatagacaatcctattcaatcttaaccagtttgaccatgaggtgagatttttacatacatttttttgtatggttattttataaccctttacaagttttgctgaagagtaggtcagcatcgtaagaaaaccttgttgtgcttttatttcaaagtttaatttacagaaaaaaatatataatacccttttgaatttagtcaatatgttcacacacatagtttcctttgcaagattaatatttacagtcttttcacaatttgcttaaaccttctgctttattttatctaatttaagacaatcctttatctctaggcaaaatggacatttccatgccttcttataatcttttaactaaaaacacattttgctgtttttacacaccttgcatgcaaatccatgttcagtagtctcaattacatgtcataatggtaactcttagcgatttttaactttaatgtaaagcctggtaagttgttttaattatgtgctagatgcagataaagtctgattcctttcagcgtagttaggagcatggtcacttctatttgttcccagaccatactaattgtgaagcaggcaagttgacagtttttaaaaggccaaagaagcagtttgcaaccttaaaacatttagcaaagctagtatctgacctgcataataaattagaccacatttttacaccttgaagacgtttgtattttaccaataattcttgtctgtttttattttaaatattaaagtcatatgaactgaaaggtaccacagcttttacttttactgcaaaatattttatttcagtgcttattattcttaggccaattaattggcctttttatagacttcacatatatatcacatgtatgactacacagacagacagaagaagatccagcagctcagggtggagcccttttacgaacaggggtatgaatatagttttcagggcttaataaacaagcacagccagaagacaaagacagatgttgagaggggcttatccacctctaattccaggggttccatgaggaaaacagggatttctccaaaatgggatttgtggcaccttaatctatttcccagggagtcccaggccaccagaagtcattctagggtctttcacgtatgcatcaagaatgataagacacagtggaaaaaagtaattcagttgactgaaaaaaaacaacaacaacaaaaaaccttttccagaaaaacaagatctatgaagagaaaaacataaaggccttttacatatacccatagctcggatatccactttgaggtaagctgagcattctttaagaaaatcctttctcattaattaaaattttacagagaatgtaaacagtgatcttcatcattccttttactggtttgcaccactaccttttcacaatcatgttcaagttctccagtttcctttgggagaaaatggctcggctctagcaagggcaggttttcctctggaccacagatccctccagtagcaaagcttgatagttaaggaggcgattgtctgttagccagggactttccttagagggcagcactcctgctatattgtatgggttgtaaacagttgtttcccatgggtaacccagtggcctctggcaccaacaaagctgccattgtaactgcttagaggcaggctaaccagcctttagccaccaagttaagttcctcacttaggtaacccactggctgttgagctggacctcaagcttcagccagaattcccagggccatttccttcttttctgaagcatagagactgaatgcttttcctttgggaagactgggggttgatgctttaagtaaggcttgctttagttggttaaaggcaggttcccaagttagtgagtgagttttaactgcttgagtttcgttatgaggtggtataaagggcaagctatttcacggtatccaggtacacacagtctgcaaaatccactaatgcctaagaatcccctcaactgttaaaggaaatgggcatcctttcttcacctgatgctctagtcccttctgataagactagacctaggtactttactgaagtctgacagagccaagctttagattttcagaccctatatcccctttcagctaagaaactgaagagagcctcagtgcctccctgagacttccttggttgggggacagaggagagtgttatttatgtactgcaaagtttcaactcgagggtgagaaaaattagatctttggacagggcctgtttcagcaactttcttcccatattaagggctgtctgagtaataaacctgttctttattgaataaaaaggtttaaagatttttatttagcttttggactatcatggaaagcttggaagagttaataggtttggctctaatcccctgcaagttctccaatatacacatttgaaagagtttccttccccattttctgatgctatcatcatggtcccatttatggtcctccaagggcactggtattttccccacttgcttctccatccctggaacatccaggagagtttaaatacttgggttaaatcttggaaggcctctatacggcagtgaagttggggcttgccccgagtgaactttagggtctgaggactaaaggagatccaggctgcactcaggggtagtgcagacttgaagatggggtgttatccatgtagaaaagaggcaagagaagaggcatccctcagtctccttctcttcagagtgacccaagatggagggaaaggctggaggggcatcccccttcacccccttcctcccgtcctttgggtcccagtgaccatccttcataggtgccgccccatgtttgcaagtatgaccttcatttatggtcctggagaagctagtcagcataactagtcatgctcatctgcttatggccttggcccttcacccttgctggtttcctagacctactttgcccataaggttcccagggtaccctaagggtccaggagagattgtatttgggcaagacaccttaatggaatggaggaagtcttttaatattatctctggcttcccttgctatggccctagtgaaacattgaaatcccagagaatgggaccaattgacttccaaatataaaatcccctttttgtttaaatgccaatgtagttggatgtagaacaggtgcctcagaaaagaacatatgaggccgggcgcggtggctcacgcctgtaatcccagcactttgggaggccgaggcgggcggatcacgaggtcaggagatcgagaccatcctggctaacacggtgaaaccccgtctctactaaaaatacaaaaaattagccaggcctggtagcgggcgcctgtagtcccagctactcgggaggctgaggcaggagaatggcgtgaacccgggaggcggagcttgcagtgagccgagatcgcgccactgcactccagcctgggcgacagagcgagactccatctcaaaaaaaaaaaaaaaaaaaaaaagaaaagaacatatgaattgaatggctgtcctcttgactgttaaagatggagctttgatatttacagatgggtcatggagcctggtccctaatagagggacataggagggaggggaattgaggaactagaggttttcgacaaacagccagcaagactccccatggagaaaaaaatcccatcccactaggtggcgctgtaggatctgagatgttaggtaaaaactctgactccatctatccaggcagaagttagagaggtttggggtttaataggctgtccccagcggaataaaattaacttgtctcataaagaaactgtttaaattcattgggcagtgctgagctttcacgtggagggaagaaataacccaaaaggagaaggaaacaatccaaatggagagggaagaggatattcacttggggtgaaatatccccttatatagtgccatcagtgtctatcattgaggacaaaaagcccttactaggtgaaaatttaaactgatcttgaatttaccctgtctccaggaaatcacaaacacaacaactctttgtcttagtaatcaggaatgtaactcaaagagttgttgtgtttgtcagttggtgtcttagtaatcaggactgactctacccagcaagactctgtctctaggatgcaaaaacacctgtaacattgcatagaaagaagggataagaggcatgatagccctgaaaagaaagaaggaaaatgcagtaggaaaagactggaggtccttgtgccagcaccctgacggctgtcggggactggagataatactgaggggtagccccagccagaaaccttcagttgccctaggacctccttccaatcccatgcaatgtctgggccctttgtgaaaggaaactggattggaatagacaagaaacctcagaaatgaaagtaaaagggtagaggtccgctcttactcacccttctgatgatcccttcttcctgcacctaaatatgttgtagttttgccaatgcaccataatgtagcagtttcttgttctctgaactagtacctggcttctttgtcctgcgtccaagaaaattgagcatggacacaagggtgggggtggagcaaaagtttaataagagagagaagaaatgctccacagcagagaggggagtccgagtggattgccgagttacagctaaatccaaaagcttttgtaagaaactcttctcatctctgtagcagtttgagcaacttctcttatcagtaaagctgtctgtgcaattccccttatcttatgcagctgtgggtatgcctctaggcacgcacaaagtgctgcttctcttgtttaactgtgggtttgttttaggtaagcccccatcctctctgtgccagtttccatggagcccaccatgtatatgcctgaaaaggggaggaaactttttcctgagagctcactaattatggaaagaacaaagggcttctgtactggaccatgtctgcttatctgtgtgtaggtgtagcctgagttttttttttccccaggttgttttaattttacctgttgctgtgacttttcaggcagaccatttctgcagtctgagtttgccccaactgatttttcctttccttctgcctcagttctagagggtatctcaaagtagaaagattgtggggtgaagaatagacattactgagaacaaaatataagaggcatttcaaaaatattatccccaaagcaattcaggaaagaactatggagccgctgttatgtgttatatgctgggaatatggtagtgagcaaaatagctgaggctcctgtctttaatgagcttacagtcttgaaaattttgtagggaagatttctatgcaagggcatagaggtatatacaaaaggatgattattgaaacattattatgaaatcaacagaaatgcccatcaataaggaagtaattcagtagactatggaacagccatactatggaacagccatactatggaatattcaataatgtattgaaacattattataatgttttcattcttattaaaagaattatgtaagtcttatacatgctcacatgggagaaaagtctatacgtactcatctgaacatgtattctatatacataccagacatgtctacatgagtagacaaaatattaaaaactatatacagccaactattaacaatgatttcctctaggagatgagatttgacatctattaggggatatctctcctcctcagaaaagggaagtagaagctcttttagggagaggtggaaaatctggagggaacaagaggattgaatgtgacaaaacctgctgaagagaggcagggagggaactttcacctttatgtcgtaaacttctatgttgtttgaattttgtacaacaaactatgcattactttgtaattcttaagacaaagaatataagtaagaaaaacacataccaatagagttattctggcacacaacctggtttacattttttgaattattatttctaaactatacattggtgaaaggagatggaaacattatacaacacacaacacaaaattatgctctattccagctctgttgtcccctgtcctctgtaagaacgcaaggcctgcagatgttccccaaatggaggtccctaggacagcaaaggtgcccctcaccaccttctgtcaccttcaccccacccttttcctccctccttcagccccttgatgtttctaattccgtcctgtctcccattcaaagtttctatcttgcccttttccccaagttgctatcttctgccttagaagcaagtcccaaatttcctttcatgttttacgtattttcaccaattctggtgtccgttgtaaatcaaaattgctgtctttctcacccagttctgctgttttaagcccagtagttagggtcagaagaagaaaaatgttgcctgagtccccatctgggttatagtttgtttggggggattattatcctcacccatctaaaattaggcataccttgctctgcctgcttcagtttctctccagaaacattacatcttcctacaagatctgcttttccctactactgtgtttttgaacttatcctgaaagagtgtttggtccctcccaactttgggttacactgcaaagtactctttcagaatcaaaatgagtctttaccagtccctgtttggggtttcttctatttaggaagaggcttctggaaactgtactcctgctacagttgtttcaaatagttgtgtagaacaactaagctctttagctaatttaaaagctctaaacaatattatcactttgttcattccacagtaaatttctgaatgcttgctatatgcctcaggtcaacctgtttaatatctttctgaatattttagtaaaacatagcaatatagtgtgtttagctttcaaacgcagtaatataatggtttatttagcaagtgaaataaatctcttgtgccaaaagctcatttcaaaaaggaaaataactaaggtccaggtcatgaaaaaaaaaaaaaaaagccaaccacctgatagctgtaaatactatcttaagtgtcctcagcataaattcacaaattaagtctttttattacagaataagtattggttatgcagtagctttacctaggagtaactttatctcataacagcttctctcttttatcttgcatttctgttaaattttgaaggctatatttcattcacttaccgtagttaagtcgatagtatgtaatccaatcagcaaatatagtcagcttggagccaagcagtatagattacctgtaaataaatatgatgaaattttctctttacagatgcaagtattggcattatgatgaaaacttgctcacttcgagcgttgtcattgtcttccataatgaaggatggtcaaccctcatgagaacagtccacagtgtaattaaaaggactccaaggaaatatttagcagaaattgtgttaattgacgatttcagtaataaaggtaatggctgtgaaactcacattttgtctataaaataagttaagcatgaataattgcaaaaaggtgatttcaaaataattagctttaaaaaattaatagcatctattgatagcatctgttatcaacaagttgacactgtgccaagcattgtatgtgagttattttgtttaatactaacagtaatcctttcagtggatatcattatgtccattttacacgctcagagatgtacaagtagtacacaaaaatttggttgtacacaaaaattcagtaaagtataccactgattataatgttagaagcgaagataaacataggtagcatgaaaatatcgttcaaaatggctttataaaaaagcttcctccaaaatttaattgagaattcttgcagtctggataaacctttgctggttttgcaaggacatgattagaatcttgaaactgtacacatatgttagcacgaataaatagaaatatggcctatttttcctttcatctctgtgcagctgatccttttattaactaatcatttttaagtatcctagagaatgtatagctttaaaatttttagccatatcaaatgcctttagagtagaggctttaagatactttaaaacttttcttcagttctcatgttaatgtcaaatctaaaagcttttaggcacaacattttatgtatgtccattttgtttatgtccatctttgttgtgaatttctataacaataatgttttcattaaaatactatttctatctcaagacaaatgatactgttggtacaataataattgagatgaacaaaaatctaaatgtataaaataacttttcaaaatcgcccaattttactaattttaagaacctctatattattaataccagtaaaagtttatcatatcctaaaaaaagtgaagatacaccaaaaggtatttagcatcctaaaataactgctttgccaaagaaaagaacacaattttggacctcagagtattctgtatttttttactgttgtcttttttttttatctttacttcttttacaaatctctaatgaagacaatcatgcaggtcccttgagtttagagtaggcagagaagtttgggctacccttgaatgaaagtacagctttaattagttttttcaatttcaaaacaacctgaaaatctcagtcctatccttagtaaaattatatactgtttggttaatcagacttgagtgataatttggtgtgtactttccctaatatattcagaaagtaaaactttaaagatttttcttttaaagactaaatgcatataaaaggagctaactcgtaatagcacttgggtttctgggcatcacagtatcctctataaaggtttggagcttttaactggaacaaattcctcacatacgtgtgcatcagctaactgcgactgagttgggccgaagtaaaagcaaacccacactctcagtggctcgcacaacaaagggttagcttttgctcaaactacacggtccttgtgggtcagcctagctctgcaccccatcctcaccacaggacccaggcgtgcagagcagcctcagctcagacactgcctgcagaggggcagtgggaaagaagacacacacaaccagcctcttaatgcttctatgcgtgtgactgatgtcatttccacccacatcttgttgaccaaggcaagtcacacatgtcctagcctgcagtcagtgggttagggaggataattttcatccgaggaagggcagtgaatattttgagcccttaacacagtgtaccacagtgtgaaatacaaggaagccagaaggtattggatgcaccatttccccctttggtccatggtaaccaagaatcaaaacttgaaacataggccatcaattcatttctgtccataaaaacttaagatgtgtttaacttgtatatgcaaaaaatcctcctaatggaattcaaaaaggctttaaaaaaataatttaggactgcactggactttaaaaaagaggataaaggctttttttttttttaagttgaagggaaaattactcaggttttctgaggggaaaaaacatgattaagcacgagaattttatttataatacttattaaaactgggtaccaaaatagaaagttttttttctcaattccagatacccacgtgtatcttactaataataaatgccctaaaatgagtaaaatattaagtatacagtctgatttgcccatttagccactaactcatctctaaatacagcaattttcctgtgattgcatattcatgggccaaatttttaaacaattttaaaacaattgaggacaatgcttgtgtcctcaagaagcatcttttaaatgatctgcagctcattctgaccgtggtgagctaatttcatgggctcatagtgatacaaacaaaagctgttctcttgtaatgggaagccaaagatggaaattttgccaaatgtgtctggtttttataacacaaaacttcctctactaaattacaaacacatatatacatatatgtatgtataattagaattatatttataatgtataattatacacttgatgcttaagataaagagaaaatgagatttttttcttatttgccaacttggtgggaaccatattcatcataccaaggttacagctttcaacactgattgtggttggggaaagatgtcccagaaaaaaatgttaaataacctataccctgtgtggattccagtgcaattgtatagtattgttagtaggcagtgcatcttcagaaaccctaaccattgcttctgtcaacagcaaacaaaatgttgttcctgaaagcgttcagatttgacattaacatgtgaacaggaacaaaaattttaatatgtcttaaaaccttaactgtcaattcgaataatcattgtttagaagggtgtttgataattctcagactaaccagttctctgtaggcatagtaaactcaaaattaacttaaataatatacttcgccttccttcttgataaaacgtgcaatctggtccatgtaaaattactgtctacccaatgcacctgtattcttgtttcctgagaaaaataataactaattggtttctattcgtctaatttataatatcgattgatttttcttaacagaacacttaaaagaaaaactggatgaatatattaagctgtggaatggcctagtgaaggtatttcgaaatgaaagaagggaaggtttaattcaagcacgaagtattggtgctcagaaggctaaacttggacaggtaggaagcatttgatatctacaatgtcaacattttgggtttggtaactaaatcatacacatttttaatcattcttcagtttttttaattgaaatgagaatgctggcttaaacagataacttatgtgtcagaattgactataatgctaatttttattagcatctaattttaaattgtgtgtaatatatgatgtaacgtatatgaggagtattctttcacctgcctcttttttttaaggttttgatataccttgatgcccactgtgaggtggcagttaactggtatgcaccacttgtagctcccatatctaaggacaggtaacattaccttgctttttttctttcctggttgaaagtaaaccttgtcctagaagggcaaataatattttcatcctttgattccagctccattcagtgcatcgagtgtgctttagtgttatccctcatctatttgtttccttgggtggagctagactgatactgtggactgatttaaatgtaggcagtctggcatttgggagaaacctagggttcctcactcaagaatcattttgtggttgggttattaagacccctctatctccaggcactttctctaagagttatatgaattgctccctctaaactggggtgagagttctaaacacttgaggaaccatgctttgatattatacctgttgatttttgtgccttttaaattagtactttcaatagtaaagaccaggtgttacttgtgtcaaggttttgggttcctatagaaactttaaagtttagaaatagacaactattccatggaattgtgacaatcaccattaaatttccagaaatgtctaaaacaacataaggcaccatcagttttctatctccaaaagccttccttgcttctagtccataattaggaaaataaaacacgtccatgtggcaaatggcaaatggcatgaatcaaaggcagaactttggaggatttaatcatgagaggatttaatgtgaaggccgaacatgaacatttttcacatgctgtctgatttaatcctcacagcaaccctgcaagatagagattattagccccatttgactgaagaggatactgaggcttagagaaattaagtaattttccccaaatcagagagctaataaactgtcagaccaaggcctccctgggaaagtttacactgcaccatgtatttaggaatgtgaaaatcataagtgaggacagttaactgaccaagtgtcaggtaactttctctaggtgaataccagcaggcttctgggcagtgaggaagtggttttccagattccagtggcagattccacaaatctgacaatgaccctccagttcacactctggagagaaggaagcatctttctggactttacttcctccatattaaagttctaagcactgtaggttttcccttttccttggtttttaaacttctgaaaagcagcttgacctggatataaaaagctgtcattttcattttaggaaaatagattttaaaatcctttctgacgagatgaacattgtaacaagcagggtaccagataatctttgtaatgtcactttgacatctaattggttatagagtactagcattttcgtgaagcccaaatataagagattttttgatccaaattctcagaccacttctgaagttcttcagcaagttttgagggattttttttgctttttttttttaaagcaacaataccttttttttttgtttgttttgcaataaaagctgttttctgcagttagaggagtgaggaagatcaagtaaaagtacagaaacacattttcataactgttcccaagaaatagcaacaaagggttgagagaaccgctaagaatgtggcaagtactatctgtgaccccacacacacgcacacgcatgcacacgcacacgtgagctttttcatgggtgatagggaaaataacaggcaagaaaatcttataaataaggtaaaattaccaaaagaaagttgcctttaggaccaaagcgaaaaggagaaaactctattaagctcagtgatatagttctttgtccctgacatttgtctgtaagcctagggggaagtctcctctctcctgcccttacgtaaacaggcttttcggcttttatgggacattcatttactctatttcccattagatattaaagtcccctagtgcacaaacaaatcaacaacaaaaagagataacgtagttaggcatgctgaactagtcttgggttcttaaatgctttttcattttctgtaaatgtttcagaactacatgtactgtgcctctaatagattacatagatgggaatgattattccattgaaccacagcaaggtggggatgaagatggttttgccagaggggcctgggactggagtttactatggaaacgtattcctctaagccacaaggaaaaggccaaaagaaaacataaaactgaaccttatcggtaaagactattactttattttcttatgttgaatgtttatctaagttcttttttttttcttccccatgaactcgtataaatgtgtgggtccatacatacgcttccatttgatctttgctgccatcaacacaatacagaaccatttgcactgtgccgcttatagatgtcataaatggcaacacatatgaaattataccccaagggggtggtgatgaagatgggtatgcccgaggagcatgggattggagtatgctctggaaacgggtgcctctgacccctcaagagaagagactgagaaagacaaaaactgaaccgtatcggtaatcactaaatcacttacatatttttcttttctccagttgctgctaacctattaacctcttgccaagctaaagattcgttattaaaactgtagatgttgtctcagattctgaaagaacatctttccttacactgtttcagagctttcaatctgctccatttgctccattgtaattgcttttaccctaaatgtgatgtccactactgagacgtacacactttcattggggaaagaaaaataatgtaacatggcatttgttccacgtacaagtgaaaaaaagataaaatcttagttatcctgtcctactggattagacatcaaattttattcttttgatgacagtgtcattctataaatttaaaatacataaattactttaatccaaccaagacttttatttccacgttcatgccgtgggtataatgttaacaatgaagggcactagcaagagatttctgggtttttctccccttttgctgttatgttaactctcaaatactaattttgtactagttaaatctgatgaatcacaatacatgactttaaaaaatgttacatagaatcctttattgcttcattctcagaaaagtgattgattaaaagaaaactctattcaaaaatcagcttttgtcccttcttgtggttctttcagtagaacaacttatgctactctcttcttttgatcttgtaattagaacattttactgtctctgtaaaaagtgaccccaaatgaaatgtttgctcaagtgttagtatagccttctcctgaatgtgtctaatcttatttttctgatcctatggttctgcttttggtctctctctccctgttacactgctggtgatgttagaactctgttttgggaaggtgcttccaatgttatggaaacgctgtgggatttgggcatgtcatgatatcaagatactgaatggcaaacataaagaagttatagcacttaattaatcatagtagcttaattggacatttaccaaattttttttggtaaatttcttattcagaatagtccaggaatcaactgcttacgtgcttaacttaacaaataactgtgggagaaaaaaaataaagggtgctgagcaaatttatatttctgttaattccataggccagtaaagaaaatttttaaagtgacctagaaaaattaaagggaggttatctgttgattaactcactggtgaccatgttaagatgcattttcaagtatatactgagatgaatgggaacatatttgaagaaaaataaacccagctgccgggcaaggtggctcacacctgtaatcccagcactttgggaggccgaggcaggcggatcaccagaggtcaggagttcgagatcaaccttgctaacatggtgaaaccccatttctactaaatatacaaaattagctgggcgtggtggtgtgtgcctgtaatcccagctacttgggaggctgaggcaggagaatcgcttgaacctgggaggtggaggttacagtgagtcaggatcacgccattgcactccagcctgggcaacagagtaagacttggtctcaaaaacaaaaaaaaaaagacacagctataacggaataatcttaaatgacagttaaataaaggtgacatgaaaatatcacctaaaatgtaatagtgttgttactgtgttaggcagcatattttaagaagaaaaagcatgagagaacaacttttttctgatgctattttcttctagtattgaaaatatttcttgattcattatccactcaacaaacgtttattgaatgcttactgtatgccaagcactgttttctggggatacatttttaaagatatgtttcctcattgaatttaaaatacagtgaatcagacagaaattaaacagataactgcataaataaccctaaaattagcctggtgtggtggcacgtgcctgtagtcccagcaactcaggagactgaggcagagggattgcttgagcccaggagttcaaggcttcagtgaacaatgattgtgccactgtactgcagcctgggcaacagagtgagaccctgtctcacaaaacaaacaaaactctggaacagcagctgtgataagtagtatgaagaaaaatcacagagtacatgagtttatggaaagatgaacctaatccagcttgggagatcaggaaaggcccttctgacaaagtgtcatttaggctgagacctgaaggatgagggaccaattctgtggaaaaggagaaggaacatttcaggatcgtgaataacatgaatgaaggccttaagacagaaaggaggctggcacgttcccggtgggagcagagccgtgaaggactcaacgggaagagagtccatggtgagcccagagagccgggagaggctggtatcatgcaggcgcatgtggaggagtctgctctggcccctgtgtgattagccttgagcagggggcagaagacaataaaggacacaagctcgggagatattggaaagtccaagcagtgttggcctggtctaggctggtggcagtgaagttggaaataagtcagcagattcaagatgtattttcaaggctgggtgcagtggctcatgcctataatcctagcacttagggaggcctaggcaggtggaacttttgagcccaggagttctagaccagtctgagcaacatggcgaaaccccatctctacaaaatacataaaaaggtagctggatgtgttggtgtgcgcttgtagtcccagctactcaggaggctgaggtgggaggactgcttgagcccagaaggtcaagactgcagtgagccgcaatcatgccactgtactccaggctgggccatagagtgagactatgtctcaaaaaaaaaagatttttttttcaaggtagaatcaatggaaccttgaaataggttccattgaacctatttgagtagattgaatattatgtatgatgatgaagttaccctaataatactgagtaccctaaaatttaagaatcatgatggattagtaattaattgttcaggggaggggagcagggagcaagataaattctgctgtaatttctcccaatggtgggagtgacttgtccctaagaagctaccaaatcttttttctcttggacctaaaaagtgtccaatttaagatccattcaagaagccccacagatacacaggtcacccttttgcattcctacctcctggcacagtaaatatctatatctaattctcctgtgtcatttctgtgctacatttgcaaactctgaatgaactgtggttgttctacaatgatttacactgttatttggcgagcccctgagctataaaattaaaaaatgacagactacttccatggtgtatggttttgttcacccaagaatgactcataaatcaatgcaggagcagttagcagaccacggctgtatggctcagtgtttttaagagtgaaagagaaaattctattttaactaaaactaaggcttaatttttaaatccacagaggtaccaaggcgccctctaatggtgaactcaaacaatgctctattttgtaatgagctacagtttcagttagaaattgtggtaaattcgttagggaattatgaacagatttttttctttttttgtaaaggctttataatttcttaatgtttggccatcagttttgtctcttctatgcattttcaggctgtattctacaaggcttcttgcctattggtgaagggttattgggggtttgtctgtaatggttattgcagtgtttctttttcttaggtccccagccatggctgggggattatttgccattgaacgagagttcttctttgaattgggtctctatgatccaggtctccagatttggggtggtgaaaactttgagatctcatacaaggtaacattttatttcaacagatggaattctccaagtcgttactaacttctgtggctttcagataaagctagttttttgtgggggaaaaaagcccacaattatatcatgcatttctccaaattgtatagaatgatttaatgaaaatggatgcctttgaggaaaaaataaggcaaaatgcaagctccaaacttaccatatatttacagggctcagctcaaaattgtggctagcaagctttagaaatgaaaatatctacccccacaccccaactttctatatattggagctttttattatagaagcccttggaagaatctgcatgcgttagggccacaattgaccacccactgacacagtcaccctttaccactgtaggacatgattcaagacagaagcagagccccacaatgactgtatcctcaggctgactttggcgctgtcttcctgcagcatccaccctgttgttgaagcagtctgggagcaatactatcttccatgctccagcccccacctcaacccctattcctacccccattttccaaaagaaagagagagagaactatatcagagtgtgagttaaacaggtattcattacctcttgtcttaaatgtcctgtgcgtagcactgtgagggatagaagaggagtaaaccagttgttgctctcaaggaacttgataagaagatattagaattatacttaaattcataatacaagaaggcagaatggcattcagttggtgtgcttaaaaaaccgtcggccaggcgctcatgcctataaacccatcactttgggaggccaacatgggcggatcatgaggtcaagagatcgagaccatcctagccaacatggtgaaaccccatctctactaaaatacaaaaaattagccgggtgtggtggtacacacctgtagtcccagatactcgggaggctgaggcaggggaattgcttgaatctgggaggcggagattgtagtgagccgagatcgcaccactgcactccagcctgggggacagagcgagactccgtctcaaaaaaaaaaaaagaaagagcgagcgttatgctagatgcagaatttgcggcagaagtaggaagatgggtatgatgttagtaagcacagataagggatgggagggggacttctaagcaagtagcatggggaaaagtacaaagaagagaacacaaggaacattcagagaacagcaaggagcaaactttggcagaatcaagcaacatgaataaggaagacatctaagaagataaaatgggaaggtgtattagggccatattgaagagagcctttaaagctgagttaagagatttttatttaatttgataagcagtggagaacgatcaaagatattaagcaagggaataacatgacccaaagctgcccttcacctataataatctcttgctataaataaggatagttgagtagagagaagccgaaggtgaagaagccagttaggagtttattataataatcacccaagtaggaaatatattagcaatggaaatgattaatgagttaggaataaagaatccacatgactttgcaaggttatattgggagaaagttgctaggggctatgagtacacagtaagaggccccttagtagcagtttattattaatactgtattccctgttgccttcttggttgttacatgagcttttaaaagcaaattattttaggatttgtttagtttaagaattctgtgtggacactgtatataatttagattttagatttacacttacaagataaattttcagttatggtttatgtttgtatttgaaacaactttcacaacgtgtttttccttcatagatatggcagtgtggtggcaaattattatttgttccttgttctcgtgttggacatatctaccgtcttgagggctggcaaggaaatcctccgcccatttatgttgggtcttctccaactctgaaggtgagttttttggataaaaggggaggacagggaactaacatttatgtaccacatgctatagtagttacttaacaattgtcagcttattgagtgggctcttcagcagtcatgttgattctcacctttaacttagctagacttattcacgaaatatcttattgttctttaagattattcagctgaagcaggaggattccttgagcccaggagttcaaggctgcagtgagctatgattgcaccactgcactccccgctggatgacagaacgagaccccatctcttaaaaaaaaaaaagattgcaccctatttttttaattgacaagtaaatattgtatgtatcttgtacaatatgatgttttgatatatgtatacattgtggggatggctaaatctggctatttggacatgtattacgtcacctacttgtttttgtgctgagaacacttaaaatttgttctcagcaattttcatatatgtaatatattataaattgtagtcaccatgttgtataatagatctcttaaaactattgttcctaacagaagttttgtgtcctttgaccaaaatcagcccactccccccaatcctcaccttctggtaaccaccattttactatctgtttacttgtttacactccacatgtaagtaatatcatgcagtgtttgtctttctgtgcctggcttatttcatttaacataatattctccatgttgttgcaagtgacaggatttttttattatttaagggtgcatagtattaataccatcatgtatatataccatattttctttacccattcatctgttgatggacacttagcttgattccatatcttgactatcgtgaatactgctgcaatgaacaggagtgtagatacctcttcgatatacagattttatgtcctttggatatatacctagtaatgagattgctagatcagatgatagttctatttttaatattctgaggaacctctgtactgttttcccataatggctgcaccattttgcattcccaccaacaggtgggaagggtatcttgtggtttaatttgcatttctctgataattaatgatgttgagcatttcttcatataactgttggctagttgtatgtcttcttttgagaaatatctattcaggtcctttgcccaatttaatcaggttgtttccttactattgatttgtttgagttccttctatgttacggatattagcccttaccagatgtatggtttgcagatgtagcctcccattccatagattgtctactttgttaattgtttcctttgcttacagaagcttcttagtttgatataattccattagtctatttttatttttgttgcctgttcttttggggttgttacatccaaaaccaatatcatggaattttttcttttagaagtgttacagttttaggacttcacgtaagtttttaatccattttgagttgatttttatatatggtgtgagatgaaggtctagtttcattcttttgcatatggatatctagttttccatttattgaagagactgtgttttccctcatgtgttctcagcatctaccttgaaaatcaattgaccataaatgcgtggattatttctggcctctctgttctgttcttttggtctatgtgtctgtttttatgtgagtaccatactgttttgattactatagcttagtagtagattttgaaatcaggtagtgtgatgcctccagcttcgttctttttgctcaagattgctttagctattcagggttttttgtggatccatatgaattttaggatggatttttttatttctgggaaaaatgtccttggaatttagatagagattatattgaatctgtagtttgcttttataatatggatattttaataatattagttctttgaatccatgatcacagggtatctttccatttattttgtgtattcttcaatttatttcatcagtgttttatagttttcagcatgtagattttttcacctcctaaatattttattgttttgcttagctattgtaaatcggattgttttcttagtttgttttacagatagaccaccgttagcatatagaaacactactgatttttctatgttgattttcctgcaactttattagatttgtttattagttctaacagctttttaatagagtctctttagggttttgaatatataagattatgtcatctgcagagacagtttacttcttttctgatttggatgtcttttctttctcttgtctagttgctctggctaaaacttccagtagtatgttgaatagaagtggggagagtgggcatccttgtcttgttcttaattgtagaggaagagctttcaacttttcatcattgagtataatgtttgctgtggacttgtcatgtatggcctttattgtgttgaggtacaatcctcatgtaatttgttgaagctttttacattgaattttgtcaaatgcctttttcacatctattgagatgattatatggtttttgtccttcattctgttaatgtggagtatcacatttactgatttgtgtatgttgaatcatccttgcatcccagggataaagcccacttggtcattgtaaatgttatttcaattatttctctgtgtttgattgaaggtaactgagcttctgtaaaacaattatttagaattatttatccaggtctactactgggagattattgtgatcttctagtggtattatgtcctcttcatttttcagtttcttattgacttacattaatgcctgtgcattttgtggaccagtcacctcttgcggactttacaggctggtttcagcttcctctatgggggaaggaaggtgtgagggtacttgcttggtgggatatagcagttctgggactactgaggataccaggtatatattccctgtgcagatcagcccaccaaggtcagtgttggcaaagattctagtgctcctcagtggctaatgctgtagatatctatagtggcagtgaggcatgttggggtctttgggtatggctgccaaggtcatcctgatttttctctcattgcagaagttgaatgccccttggcactggttctgactcataggctcacttgcagcggcagtggcccttgtagagtggctggggagctgaggactgaagcacaagcatgagtggagagactatggctacaggatcttggacagtttaaaaaccccaggacttagggcacagatatttcgctactgtattgataacagaatgcgaggtaccagatgtttgtgagacagctgaagtagccaagaatgggagcacagatgtgctcagagttaatccagctctagggacagagtggtgcctaggtctctatggcagctgagctggtgcttgggacataggtacctctgctgccatgttggtagcagtatgtgaggcccagatgcttgtgaagtagcttttagagccaaggaaaggagcagaagcatgcgtagagttagagcagctcctgagttggggtgggttctagctctctgttgcagctgatccagggcctggagatggggcatgcacaataaaggcgtggctctgaggcctggagcatgaacgaactatagcaatggttctagtgtcggggcaggcccagtgcagccacagagcctggggctgcaatgtggacactagcagaacaactgtggcttcaggatcagggctcactgggccatgggagaattggcagagctttgcccaaagtaattcaagagtagctgctgcttggatggtggtgaatgttcagatgcatctccctctctggggttccccagcagaagggctgtcgtttacctcagtggcaagtgatgccagtgtcctctagggagcaggcctctggaaactatggtagttcctgctgcatggccgataccaatagcatctgcctttcttctttgttcctagctatctccttgtgcctcaggtatgtagacctcacaggtgatcctgtcctatgtagatattcttcgtttcttttcctccattgtgttgctgcagattcttcaatgggccctggagctctctctgggctatttgggtttgtgaataggtgtctgtatttgttttttagttgtgggggaataaaggctggtgtctcctactttgccatcttggtgacctcacctcccattatatcccattctgattaagattcctatattgaatgttctccatgaatacatttcaaataaactcaaaaaagtctgacactgtgtagggaaatagttgaagggaaaaatactagcttctgttattcacacatgagtaaaatatggtttggttttttttttaatttagataatcatgttaggagtttgcataataagcaaaatcgaatttttgaacagtgcttacaaaagattaatatctcttgtccctcaaagattgaaaagttaatgtgaatatcctttgtcctgttgtattctgcctccatattctctatctctgtcacataaaatagaggaaaattggccaggcacagtggctcacacctgtaatcccagcactcggggaggccgaggtgggaggatcacgaggtcaggagttcgagaccagcctgaccaacatagtgaaacccagtctgtactaaaaatacaaaaattagctgggtgtggtggtgggcacctgcaatcccagctactcaagaggctgaggcaggagaatcgcttgaaccctggaggcagagtttgcagtgagccgagatctcgctgctgcactccagcctgggcaacagagggagacttcgtctcaaaaaaacaaaaaaatagaggaaaatcccactgactcttttcattgtgacatccaaattgttctattgtaataaatattttgctgtgattatttaataaaaatctcatctcctatgccataaatatagaactaggattgataatctatattttaccaaaactcatgaacctgcagaaaaacaaaacattggtttttaaaacattttggaaatgttaaaaaatattttttgaataaataaaatgtatttaacttaaactgaacgggactgttttagtaggatgagcatcctcccgggcttctttcccagtcacacgtttattaggaaataaatcacagttctagttccttctattgattctccccattccagggagtgtacgtgctctctctcagcttcctcaaatgagatatgtcatagtcgccgtcttccaagagaatgacagtttctagctggggaggacagaattagaagtagtgtagtggtgaatgatgacctggtgattatccagccatgttggggtctcccagttctttgacatttcatcccagactagtgacacttaggggtggcatttatttatgaaacaaaccaaggaagcttcatgcagacatccagatgtcccactgcttggaggacaaagacctctatccctggcaaaacaactttgaggtttatttggttgggctgctttcataagttctaagaggcatgcaactctgatgcccctcattttctggaacgcttaaccaagtcaagtttattgttggctgtagacacaacttgggacagttcataaaatgggaataggtaataagcagacagctaagctttcagagccagaacatccttctcattggccaaatgaagccccagctacaacaggggatgagatttaaatgtctgtgataaaacaaaaatagcaccaaattaacaccaggcatgattgacattgcaggaaattccccttggagttggactcaacaatcacgaagaattgatgaaaagccaaattgactcaaaaaaagtctattctgaaagaaaaactaaaagagctgagaggtggctatttatcctctctaaaaattagctatatataccatacaaactacccagtaagtgtgaatttagcatacacttagtgagtacccagcatgtgccaggcactttcttttctccagttttgacagcatctacttgagccatcagggggccagtggccaggtctgtttctccagctcatttgtctcctctgagcctcaaaccttctagagttatcctctttgatgtcctttagatcttccactcaacagaagtcaaaactgacctttaacttttcctcaaaagtgattccttccactgtgttctctatttgcccgtgaatgaaacttagggaggcatgtagagttgttccctgtccctcccccttaccaagtgctggtgattctgcctcacatatagctcttcaatccatccctttctatacttagtgcagcccctcaaatctctcccatgaatagtaaatagcctcctacttggctctttgccatcaagttcaacccccttcagtctaccctccactcactaccggtgtcattgatctgaaaattaaatctgatgtcacttacctgcttaaaacgtttttatggttgtcatctcaagggtaaaattcaaagttcttttaaaaataataatattaataatagctaacatatggtaagtacttacagtgtaccaggcataaatctaaatcctttatatagattaacttcttaattttcacaacacactatgaggtaaggactatatcctcatctaatttttttatgttgttgttgttgttgttgttttgagacggagtttcactcttgttgcccaggctagagtgcaatggtgcagtctcagctcactgcaacctctgcctcccagattcaagagattctcttgcctcagcattccaagtagctgggattataggtgcgcaccaccacacctggctaatttttgtatttttagtagagacagggtttcaccatgttggccaggctggtctcgaactctgcctcccaaagtgctgggatcagaggtgtgagccaccacgcccagcctatatcctcatcttaaaatgaagaaactgaagcaagttttctcccagtgaatactgcattccagtttttgtaaactacttgctatactgcaatacaccatgatttgtcatactgcatttgcttttctctttgccctgaataccattcccacctaattaaccactccttcgagatggggcaacacagtgccactctggccctgtccatctgagaaaactaattgctccttctttttgttgccataatcttacatgtgtatacataactcttcaggtttgttcatgtctagagtacatgtactgtgtctaatttcgtatggatttgcaaagattcagaatgtttagtggtatattagtctgttttcacactgctataaagatatacttgagactcggtaatttataaagaaaagaggtttaattggctcacagttctgcaggctgtacaggaagcttggcagcttccgcttctaagaaagctcaggaagcttccaattatagtggaatgcaaagggggagcaaggcgtctcacctggtgggagcaggagcaagagagagaagcaggaaggtgctacacacttttcaccaaccagatgtcacaagaactcagagtcacaaggacagtgtgggcatgggggtggggggtggactggtggtaaatcattcatggaggatccaccccatgaaccagtcaccatccaccaggccccgcctccaacattggggattataattggtcctgaaatttgggtagggacacagatccaaaccatatcaagtggtaatatcgtatgttcttttatcatgctgcttataacagctttttttaaacccatgggcttttgtgacaacaatgcatctaggggcatgttcaccctttgatagttatcttgttgcctagaaaacatttaatctgaacactaggtatttcttttttgaatgtaaaacatgggtcggccacatggctgacaggccaaatccaaccctttttagtaaatcaagttgtattagaagatagccacactcatttgtttgtgtattatctacggttactttctcactacaatagcagagtcaaatagttgccacagagactgtatagcccaaaaagcccaagatacttactatctggccctttatagagaatatttgctgatgcatgatgtacaagattaagggattgagtattattttagttcatttagtgttgctacaacagaacacctgaggctgggtaatttatcaagaaaagaggtttatttattcacgattctggtggtttgaaaattcaggcttgggcagctacatctggtgagggccttatgctgcttcagctcatgatgggaagcagaaggggaatgcacatgtgcaaagagatcatcacatggcgagagaggaagcaagagagagaccaaggaagccagactctttaacaaactactcttgtgggaacgaatccacttctgtgagagcaagaactcaccccctcacctccataggaggccattaatgtattaacaacccaaactcctcccagcaggccctgcctcccagcattgccacattgggcatcacatttcaacatgaatgttggcagagacaaatcacatgcaaattatcactcaagtgtgtaccaatttggtcacatatattcatgcaaccattcattcatcaattaaagctttaaaagctagatatttgtcagctatcacagtgtcagcatattttattgctctatagctgctttttcttaaagtgaaccaactggggtcgggggcaatggctcacgcctataatatcaacactttgggaagccaaggcaggcagattgcttgaggtcaagagttcaagaccagtctggccaacatggtgaaaccccatccctactaaaagtacagaaattagccaggtgtggtggcgggcacctgtaataccagctactcaggaggctgaggcaggagaatcgcttgaacctgggaggcagaggttgcagtgagccgagattgcgtcactgcactccatccttggtgacagagtgagactccatctcaaaaatatatattttttttaaattaaagaaaggaaccaactggggaaaatacccagtccatttggggttatagtaaaatagttctattatagttataacaggatcaataaaatcacctgcaaaaatgtgttttattaaacagagcttttgtttctcatgatggtttctgaaatgatatttttttccctacacttatcaacagaacgattctaatagaaagagattgtaggccaggcacagtggctcacacatgtaattccaacactttgggaggctgaggtgggaggatctcttgaggccaggagtttgagaccagcctgggcaacagaatgagactccatctacacaaaaaaataacaaaaattagccaggtatagtggcatgtacctatagtcctagctactcgggaagctgaggtgagaggatcacttaaacccaggaagttgaagctgcaatgagccaagattgcaccactgcaccctagcctgaatgacagagcaagaccccatcacaaaaaaaaaaaaaaaagaaaagaaaagaaagagattattatagggaaagaagtacagtgtccagccaagctctcataaactctctctgagattcaatttattcttctgttagcagaatagaatacattatctcagcatatatgatcttccagctcagggatatcaggttttgtacaatactttttacttaaatacacatgatattttaatccttggcagatgacatattagagtcattaacttgcatttgttgtttaattaaatgccaggtcctgttgaaatgaatttgttatgtgtaggccattttcatgtgtctaatataggctgtttatgatatgacatttgtatttttataacgatatatatatatatattttttttttacagaattatgttagagttgtggaggtttggtgggatgaatataaagactacttctatgctagtcgtcctgaatcgcaggcattaccatatggggatatatcggagctgaaaaaatttcgagaagatcacaactgcaaaagttttaagtggttcatggaagaaatagcttatgatatcacctcacactaccctttgccacccaaaaatgttgactggggagaagtaagtagtcacatctcaaaatgtatgtgtttgtagactgagtttgggagaaggcagagagaggtggaaatatgtaagagggaagtattcttggggaaaagttggggtaaaaactgtctgataggatctaccacctttccactaaacagctatagctgccagaccagctggccaccatgctgtctcctggcagcctttgctcattggccccctagcctgcaagacatccactcttcactccagctcctggcgcctccatgcctcttactccaactcccttccttaactaatttcaatttatcttactgctctcaacttagagatcaccaatactgaaaagcccttcttactattccccacttcatcaaaaagatgcagttctatgttctttccaggggttctcacaacacccaaaatcacctatctcccaaccagtctgagtgcttcaggaccttgatcacttgtgtccaggtggactgatgcagggacccatatacagtagatactccaacaatgcttttcaaatgaattaaaaataattaaaatcagacaaaagcactttgacaatcagacattgtcatttctttgtttattcaaacttgtcttcagactcacttctgattgctccctgcagccccgctgtatgcctcacaggtacactaaacctgccatgaacgttcaagtctacatccctctgcttaattatgttcagcaaatattggttgagggcctactatgtgccagtcactcttctagacagaaaaccagagaagcaaagtcgtttttctcagggaactggcatgctacctggggagagagaccaaaaaagtctgagaaaacaaaaatgataatgacagatggtgataaatgataatgacacataatactgtcaagaggacttaagggcagggtaaggaaagcctctctgaggaggtgacattcgctctcagatctgaatgataaagagtcagccaatcagagagtggagatgaagggaagctgaccaactgcggaagcatagttcatctgggagtggattccttatgggttggtgtgtgaagggataagggccagaatgacatcgaggttgttttgagtagctgattaggtggctgctgagattgggaagatagtaggggagtgaatggagggggcaaggcttctgttggtgttctgggcatgtgaagtacctgctaggcgtccaggtagagccattaaggcctactgatcatagattgtaggttgtatgatgccaaagtccagaagagaggccactctggagatgtgcatttggggccatcagcaggtaggtcgtttcatgggactgaatgaggtccccgagggagaaaacacagatagagaagagaagactagacccatccgtcagaaacgccagcatttagagttcaggaatagaaggaaaaaccaacagaggacactcatgctgctctctctgtacttcttgctttaatatactttttccctatactcttattttacctgtcctattacagcaaattatgtttaactccaactagaccataagcctttcaacacacagatctctctctgagggcccagacaagtatatccaactgtatgcttaacatcaggacttgaatgtgtaacaggcatttcaaactcgacatagcctaaattgaacttcctatctcctccccccaacccatctttgctgatttcttggtcaaaaactttggagtcttccatgaatcctgtctttgtctcgcacttcatatctagttccagaatctgatcccttgttgcctggtctaagccaccatcatctctcactgagactaacttgttgactctcctacagcctatttcaaatacagcagtcagagtgactgttttaaaataaaggcaaatcatgtccttcttctgctagaaaccctgcaccttcacctatgagtgaagacaaagtcctttctggtagtctccaagatccacaacatctgtccccattcctctctggcctcacctgctactgctctccccactccactccagccccatgtccttactggtcctcagactccctccaggcatgtgcctgcctgtgctgttccctctgccaggaatgcttccttgcagatacacgcatgcatggccagctctcacacctccttcaagtctgctgacctaccacttctcagtgaggtccaccttgttacttcccaacgccctagctcccaccctaacttcctcttcttttcctttttttcaccacacttatcaccttttgccataacagacaaattgtctactatgttttttaacttatattctgtcttttttcccttacattcccagagtgaatggaggcaggggcccacattcactgtggcatgcccattactggggtaggtgtctttattttgttcactagtgtttcagagcctacaacatgcctggcacacatcaggtacttaatatttgatgattgaataaatacatgaatgaataaatggaattttctgtcctccttttactgtctcactcccaagtatatcttcagtttaacctcttcccattctgacatctgcactttatacttcatttctcggcatttccttaacattccagggtaaacccctacctgttttaaaggtgtctcttggggcagtctttggagctcctccaggcagggtgagcagctcttcctctgtacattcacacctctgtcctgactggtccactacccctctgtctctctacaggcggtgaggaccatgacttgcacctcttcatatcctcaaaacctgttatcattataggtgcacagtccatatttgctgactgaatgcaagaataaaacattttatccaaatagtatagcgatttataattcagagaaataaatggcttttccaaaaatagttcttttcatacaaaatgtacattccaaagatggaaacctgtgtttgcttttcatctacgtttatagagaaaagcctcactgcctggtcatgtgccatgcatggcctatgcaccctagacccctacaggcagctaccaaaagtgctgcatagccatttgggagaggtcccttacaaatccagtctgttctagatatctagggccaggccagtgtttattaccactgtggttaggttctctatttgcttctcattcacatgaattactgtgattctgaaattgcaattaatggtaactttttttttctctgtggtattttacggaaatgtatagtcctttgctcttagagaaagaacccattccagtgttgacttcaagaccataagttatttcaaaactatgtaaagattgacaatccagtaataacctgtcactacacatacccagattttccctgtaaactgtaatatttaacatgaaatgttaaattctgatgccagagttcatcaaaaactaaactgttgcctgctttttgcgtctttattcatttttttagatcagaggcttcgaaactgcttactgcattgatagcatgggaaaaacaaatggaggctttgttgaactaggaccctgccacaggatgggagggaatcaggtaaaccaccttacttttgtgtttaagttgttccgtattgagggccatcaggtttattgatcacagagtgatctttgtactttggttttcgatttggtaattttgtttgttttgataaagtaaaacattctgtaaaaaaattgacagtgttaaaacattcacttaaatgatgggaataatagcagtattggttttcacataagcagtcagaatctagaattaatgtctaatataagggattaaaatatattcctgtgggagtatatatttgtcactaccgtaactatgtaagcctagctccctaacaattttttgcaagtattgctcactaatcctcatctttttgcaaatagagtgttactgccagtaatgtatatttcactaatatatattctcttacttatgtgggtatgtttttgctttttcattttttcacattgttggtacttaataaatttgtgttagtgacccatttggtatcttagagactaaagaacttaatgatttcagtgttaataaggatcttcactaacatcaaaataaatataatttgtctgtggacttacagttctaaacaaaattatggaaaaataagttagtcattcaatttaattataggagttaagtttctttcttttcaaatgcacatcagcagggaaggtgcctctgttacttaattctctcttttccttttacagcttttcagaatcaatgaagcaaatcaactcatgcagtatgaccagtgtttgacaaagggagctgatggatcaaaagttatgattacacactgtaatctaaatgaatttaaggaatggcagtacttcaaggtattctgcattttaacttctgaaatattatatgcttttcattttcagtaacatctagcatgtggaatttagataaataaatcttaaaacctgcattcaaattcacttgcattttcctctcatttagtcccttgcataggttttcctgagcactggatgactcattgttctataatgaggcatcacttttgttctctcttacaatattgtcatgtaatgaggccacgatgatgtctataaagagcactgctaattttagtaatacaagaaagtcagtgttctgtgaggcagtcatcaccattgctctcatcaaaatctgatttttgaaatgtaaatgaatcattcattaaagtaaaatatatttaaatatatttatactattaaaaatttggttaatatttgatattgtccagcaggtggagatagagacaaacaaataaaacttgaaatctaggctttcataacgtctttatcattgttgtgtgctaaatacagtgggataaatgtagctagttgcttactttaatggtcaaatttagttattcacgtgacactgctggggtagctttgtgtttcagctgtgagtatttaaagctctgtggcaagttgaggattacaacatattaatagatttatgtatagttttcaaattctagatttggctaacataaatcaatttattattaaacaaaaagtggggaaagctgcctcacactaaaaaaatctgtcaaccctccattttatttactcacccagtatttgttatcatatcccatctgtcatgcaagcaaggacttgtttgctatgtaataatgatatgacctagcttaacattccctgttactgtcatttacagataatttccaggaagtgataagcacgtatcaattgatgattttgtttcttataacaagttaggaaggagaagaatagcataaaccttaaagagtggagcatttattttcacaaaaaaaaaggatatataatagcaataaatagtaggggtcagtgagaacaatattagcaaaatagtaaaagagggctaacacaccagaaactacatcaagaagtaattgaacaaaaaatgacacataacatgttttaggtattttaaagacgcagcactgaatatacatttgtgtgttagatattactgaacattcacttggggaccaataatatgttagactgtaggggagttcaaaaatatagctaaagcacgctattatataatggcagagaagaaagaaatgcaaaaatagagataagcaaaatgccataggacagaaaagagtgattcatgggaggaattactgctgaggagtttcatagaggaagtgtcattgcacaagtcctgaagtgtaaaaaggctttccatggaaagtaaataagaaagcctggatgagcaaagatgtggcatgaaaacatgtagaaaattcaaagaattgtatttcatttggtatccctcaattgtgctttggaggaaagagcaccgaacttcattttttaagttttggagagggatagaccttatttgaggaaggtagtgatggaaaacaatggctacttttaggaaaataattctggaaacgtgaggtatggactgatgaagcaacgagatcagcttgagcagcagttctcaaactttctgtcctctggattccctttacactcttaaaaatttttgagctcccccacccccaaattgcttttgtttatataggttatcactagcaatatttccagaactggaaagtgtctgagaaatttgtaaagtttttatatattaattcatctaaaagtaataataatatacttattaaacattaatgtaaatgacatttttaatgaaaaataactatgtttacccacaaaaaatagtgagaagaatggaattctgtatttttgcaaatctctttaatgtctggtttaatagaagaagacagctggattctcatactcctgcttcatttggtctgatctgaaatgttgttttcgttcaagtatatgagggaaacccagccccacacaagcatacagtttgtaaagggagcgagtactttaatagccgttcatataattgtggctgtttttttattgtacaccacaacttaataattaagtggtagtttcttaaaagttatttccagtgtagactgatatccttgagcattgtacctcattatatggaagtacttgatacgtacttcccacttcatctcatagaattttttttaagtatactgaggggtcaagactgaataaaacgaatgttttgctccttcatcagtgacatccttaagtgaaaccggcatttacttttcaactgtgtgtggccatgagcaatacaactataggtactagcatagtttgattcatgctaaggcaccatcagttttactcaccattgcttttgcactatcggtataaatgttgctaaagtgaaaaggcaatggtgtcttcgtattatgatgaaaatagtttcggccttacagacccaatcctggatagtctgaggaccagactttgagaagctctgagctatattgaagaaacctacagcatatggtgagggccaaaccagggcatctgcagtggcgatgggaaggaatataaaccagagacattgcacatatccatccttagtgactggtatgtgagtgaatgaggaaaagtgcagtatttcctaaggactagagagctgggaatgtcattagccaggataggaacaagagacatagatttggaggggcagataatgaatttaggtttgtatacattgagtgtgagataccagcagtatattgtgacttaacaatgaaagatcttaggacttagaaaactgacaatcaagagaaatccagaaaactgacaatcaagagaaatccaaagtctgaggtgtggttgagaagcttttccatttccttaaactgtctcctcatgaaagtcaagtgatgatttctgatgtcagtgatatcaagggtccaaatttgaaacttttttcttactgtgttttccagaacctgcacagatttactcatattccttcaggaaagtgtttagatcgctcagaggtcctgcatcaagtattcatctccaattgtgactccagtaaaacgactcaaaaatgggaaatgaataacatccatagtgtttagagagaaaaaaataaaccaataacctacctactgacaagtaaatttatacaggactgaaaaccgcctgaaacctgctgcaactattgttattaactctgtatagctccaaacctggaacctcctgatcagtttgaaggacattgataaactgtgattttacaataacattatcatctgcagttactgtttacaagactgcttttaccttaaactttgtagatgtttacatctttttgttgtgttttaagatgatgttggtaatttgtgcctttagctctgttttattagacagagttaaagcatgttgtcttctttgggattacactcaggggtctgaaaggcagtttgatttttatttttaacacacttgaaaaaaggttggagtagccagactttcatatataacttggtgattatcaacctgttgtgtctttatttaattttacatctttttgaagcactgccacaggttattagccaaggtggccttccttcacagtcatgctgcttttttgaaaggtgaatttcaacacatttagtgcctctttcatttctcagtatatatttcaagagcttgtgatgaaatctataggatggtaatgatggacttgtcacctgtatggggaatacttttactactcagaaatgaatttatgtgctgccatttgctataaagttgaactttgtatggcttgaaaaagaaatgacaatatggaacatcccaaggctgtcccatagggttggaagttgtgtagcattcactcccttacctactggcattcccagtgccctctgtccatacctacttctaggattgcaaaggagtcttccaactagagaaaaattgtccactgacatttgggatttacttttctccaatacctgccaatacagaaaactattatcagttgttattgttatcccttgaaagcgagggtgacaaaaacaacaaaacaccgttataaacacatcaaaggttcattctgactgaggtaagactttccaagcccttgttagattaggccttataaaacttgtgtgcattataacctaagctgtgcaacctgtgaagccaagagtgaactgatgtttcatttatattttcatccaaatgacattatctgcacgtttttaaaatttaaaaacaaaggactatttaaaaatacagtttattaacaaacgtgaactactttctgttacattaggtgttccctagtgtttcttaatttctttttagaaagtgtatttttattagtatttttccggtgaacagaagatttgtttggatttaaacatttactaagacagtacctattaggaaaaccaaatattgcaaatggtcaattcgattttaatttctcaaaagatactctgttatccagaagattaaaatgcctacattgagtgcttaaaaaaaaaaaaacaactgtgatgatgtgagcagaatggcaagtaagttaagcatttttgatcctgtaatcatggtatcattacaatgaaaggaattcacaaactactgccagaggaagtttgttttttaatttaagagggaaatataacctataaatttgtttcttccaagcttagctcttaaatttggagactcaaagttaaacatcctcaacagagttttatttataattttgaattgtcaatttgtattttgctactgatctgtgatcaaccattttaactttcatctctagggatgtttaacatttataattgcaaaataaaccaactataaaaaaagaaactaagagagaattggtactttaattacttgtgtgtttgcaaataggctccattttccatgttgagtagattataaccttattaactatgcataggcctaagaaaggtggcaatgaactgtgcatgtaaattttaaatgggtactttgtgcaattcgttaaaagaagatactctatgaatatgattctatatattgaaatcagaaaacctaccaaacaaaaacatcagaagctgctgccataatgactattttctactgtaggctgctttggaaataattcccatatccttgctttgtaagttggtaatatcactatgcatttctacacattttataaatttgatttatgcagattttgatacactgtatgtttctgtagaaattgtataaatattcaaaattttattaggataaatttgagaaacttacgtatatcttaattctgggttgcttgttttttaggtgacaaaaataaaatattgtattttaattca

SEQ ID NO: 749 - DNA, 4313 bp, Homo sapiens
taacgctctttaagcaaacagagcctgccctataaaatccggggctcgggcggcctctcatccctgactcggggtcgcctttggagcagagaggaggcaatggccaccatggagaacaaggtgatctgcgccctggtcctggtgtccatgctggccctcggcaccctggccgaggcccagacaggtaaggcgtgcttcttcctgctctgtggggccacagccagctctggcagcctccgccaggagccactgttttacatacatatttttgagcacctgttttgtgccaggtgctgttctaggcccttaaaagtatatccaatttacaggatcggcaaaagcaggtggagagtaactcagggtggcagggcccccggagaccttcgagaagtgcgacgaggagggggctgccttcagtcggggctgttttcctgtgttaggaagactatacaatcctcccaagtgtcatgtttcaaagaggaagtgttggcgtggggtctcagaatagtgcttttgactgttcatgccaacatctcccccaggggcagaccctcccaaggcccatccagataggcccaaatgccggtcccagtgatggccacctgggagaccctctcccacaggcccgaatgcccgtcccagtggtggccaactgggagaccctctcctacaggttcctgggctcccctgggatccatgctctgggagtcaaagccacctctctcatgagtgcgtggctggcaacccatattccctggtgttgtcaagtggatcggttgccctgggtccttctagggagtggaggaggaggccattcttgcttccttgggaagtgtttgcatctcaactcctttacctgcagaatggatcaacggtctgccctagggctgtcaggaaatgctgtgtggcagcatctgcgacttgcactttgccagctgtggggagctgaataacttatttgccgttattaggtacagtttcaaggtgggggcaggagaaagggctttctacgtttccaaagcaagggtttccagagaggcctgaagagggagcgcccagtggtgctgtccgtgcccccactgccctccagccacctcttgatctctgctgtggggtaccgggcctgaggggtgggcttgggcagcgtagaagagcagccagcattgggctgcagtgggaagacccccaagcccatggcagggagcgggggagctttggaacccgagagaggaagtggcctcggtgtacagaacgaactgggtgggtccccgtgctggccacccccaggcccatctgcctgcgcccttgcccccaccccagcccccagctctgccccctgtgctgtgggatcacagaggccgtggcaaactcccctccccaccccacacaccctctggctcaaggctcagagcgtctttgcgggtcactcaggtccatgatcctgttacaactgaaatctagaaaattgtgattacagtttagtgcattcgtgtgtggaaaccatttccatttatttccatcatgcgacaaagacaaagcgggtgggcaagacagagtctgccggaggcagagcaccggggctggaaatcttcctccctgaggaggaaacccccccgacccccaggatgatgatcctccctcaccacggggcctctcttgacccccacagtgtcccgggggtgggcgatgatcaccttcacgtcgcgatggatccagaccccaggagggcaaggttcccatggaagctgctgggcagcgggagctgaacacggatccttcccagcaagccaggaacactttctccaaagacatctcgaggcagtccctgatagcaaagcagacaagagaacagcccctctcggcctcccctggggcgccctcacctgagccagtgtggccagactgagttcctcccctcctatgccccaaggcagggacagggaccggagggtgctctgggctcctctttcaccccctgctgcaggctgtcaaccaccagatcctaataggttgctttctgagacctttgattccgcggagctcagagcctgaagctctggtgttagaacctcttgcataagatcctgcggcagcccccagccagccccatctgtccacgtgtcttcctcctctagatccctttcctcactgccctgcttcaagctgtttcacagcttgtaccctctgtcggctcctcctagaccaccccacccggtcctctcaccttacctgcaatgggtttccacctcctgaacacacctgggtctctggaatggcctttgcccatgcggctccatcttcacctggtgaacctcctcctgcagggagcccccctgctttgttcaacctgcttgtcattggcctctccggggagtgccctacccccgtggttaccctgggcaccctgggacgatggccttgcgttgtctcgcacatgttcttgcctttctcctccatcagatccttagactcttttttttttttttttgagatggagtcttgctctgtcactcaggctggagtgcaatggtgcgatcttggctcactacaacctctgcctcctgggttcaagtgattctcctgcctcagcctcccaagtagctgggattacagacgtgtgccacaatgcccgcctaattttttgtatttttagtagagatggggcttcaccattttggtcaggctggtcttgaactcctgacctcaagtgattcacctccttcagcctcccaaagtgctgggattacaggcatgagcctgggcccagatatttagactcttattaatgacttctctggttttaatttctgggtctctctcacctggcacagtgcctggcttttgccatgctagctcccacttctcatgcacacaaatggtgctcagtaaatatttatgtattgagtaaaatttaataatcatttgttgaaattaaaaagtgaataaataagttacctagaaagatgcaaagtccacaaacctggggcaccttgcattttccctgagcgtaatgtttgcacatcaggatgtgaggaccacgtctccctctcatgtcctgagggttttatatccgcctcactggacagttgctgatgtcattggagaaggaagctggatgggtgtgtgcatgataacatcaaggaattcagcccacaacttactttgcttcttacctgtgcactttcagagacgtgtacagtggccccccgtgaaagacagaattgtggttttcctggtgtcacgccctcccagtgtgcaaataagggctgctgtttcgacgacaccgttcgtggggtcccctggtgcttctatcctaataccatcgacgtccctccagaaggtatggcctttttatacgatgggttctgaagatttagaattagttagaaaagtcatttaagactacagaggctctgatcagcatcaccagctatgcctttacacagagtcacggccgccagtggtggtgcaatggggtagcctgagtcaggctgcattcaggtccaggaatagaaaggcagggctaagggacttgggaagaaacctgatttccccccggcttctcttcacatctctaaccaaaagcctgggaagagccactgttggtaacgctttctagcttgcctaggatagagggggaaggcatgacgaaatctgaagacatttcatgtattctttttttttttttttttttgaaatggagtctcgctccgttgcccctgagctggagtgcaatggtgcgatcttggctcactgcaatctctgcctcctgagttcaacctcagcttcctagtagctgagattacaggtgtgtgccactacgcccagctaaattttttttgtatttttagtatagacggggtttcaccatgttggccagaccggtcttgaactcttgacctcaggtgatctgcccgcctcagcctcccagagagctgggattacaggcgtgagccaccgtgcccggctgacagttcatgttttctaaagaatgtgcctatggatactttaaagtaaaaactctgtaattgtttaaatgtgaaagaaaatgtttatcctcactaaagcatctctttctccctccccctcacccctgtagaggagtgtgaattttagacacttctgcagggatctgcctgcatcctgacgcggtgccgtccccagcacggtgattagtcccagagctcggctgccacctccaccggacacctcagacacgcttctgcagctgtgcctcggctcacaacacagattgactgctctgactttgactactcaaaattggcctaaaaattaaaagagatcgatattaa

SEQ ID NO: 750 - DNA, 93101 bp, Homo sapiens
ttctttctctcggttcacacgccacgtgtgcaacatcggagatgctcataaaataacccctggcccgaaagggcagtagaaaacggaaatttgttggctggcttggaggatgcttccactgtgttcttcacacgagccccgggcctgcctgttgggccggttgcgcaccccgggcgcgcgctctcccgcgcccacgccgcgcgcaccagcggcggcggctgccatggcgacccgcaggtgagctgcagaggcgcgcgtggtccctgccccacccgcgcggagccagagaggaggcggttgtcaaggcgacgtgggtaggaggagaggacagagggaggaggaaggatgggcggtgttggcgtagccgcagggaggtgactgaagcgagcctggcctcttgcatcctccgcctgtgtacctccctcccctttttttccgccttctgccagcagaagcagcagccgcagcacctgagccgctactgccgctcactcaggacaacgctatggctgagcctgggcacagccaccatctctccgccagagtcaggggaagaactgagaggcgcataccccggctgtggcggctgctgctctgggctgggaccgccttccaggtgacccagggaacgggaccggagcttcatgcctgcaaagaggtactgccgcccccctacccgatcccgctttggtcacaaaagtcttggatccaggcggagaccttggggacccaggcgcagagagtttcagacgccacggagtttagatttctttggggatgaggcgtggggggagggaagaggagccagtctggcgtcatgaggaggccagcacattggaggactcacggatagatcatcctcacagattgggatgctgagctcagcgagaaaggtcccagccccaagaaggggagctacctgggtacctgaactcagaatgagggaggcagacgagttattttccagttaggatgaactcaccttaaaagtggttgacaagaaaagattatgcacagagaagcaaaataggaagaggaaagaagagtagtgggagaggaaaggagttaggaaggccagaaaaaagtatcagagcgaagtggttttatcatggctacacaaaacggagtgtgaaggtgggagatgtgcgagagggatgataggattccagctctctagttccttgtttattaaacatcggttagtgcagactgtaaaatgtgtctcctccttatagcttggcctccccgcagcgtactatgtttagtgtacctgacagtacacgactcacctttttgcagattttgagttcttcaatatcttgtgttctgccaacctctagtctccttctctgacttaacatatgtcaaagtctttttcaaggtatttccaatatgttggaagcagaattcagacaataggtagtcaatctcttataaccaaaaatagcttttgaaaagtcatcttggaggaacataaaagggcactagcagcaacaaaactaagtcatttctatgttattgaaataacaatatttggttgtgctctgagcaacttttttagaaaccatatggcagaggcaacaataagatatttacaagaactacgttggggaaggcaaaataaaagttctgttatttctgtgaaatgtgaaggacttcataaaaagtcaagcatctagctctgtaaatttaatcccaaatatcaagcttgactaaggttttgagaggttagaatatatatatagatgtattttctttactttaaaaaatatatgttttaaaatagaaatgaggtttcgatatactgccccggccagtctctaactcctgggctcaagcgacttcccacctcggcctcccaaagtgctgggattataagaatgagccactgcgcccagcccagaatattttttataaattgttagtgtgaactgattggcaacaactccatcccatatggagataaattcttataaagatgttctgtgtctacagcacagcaggtcataaagaagtcaggtgtgggggggaggatttttgtgtgaataaagatacttgattttgaagattcatgaatatgacataagtgaccccagtgagtgggacttttgataacctttattagctccaatgacaacctgccctgggccatctacatttccacctagccgcattatgacctgttttagagatcgcagggaacagtatgatcttatcagtgactggctcactggccttgatggcctgtggtctaaccaaccaaaataatgagaccaagaaagcccacttgcctaagaatcaaacaagggagtttcctgagtggaaggtaagaatcatacagtttaactaccaattcttgttgagatctttgtcaacaatggaaaatatgagacatttcagaaattaagcacttctattatcttggtttggaggaagggaagaatattgatacttgagaactcgaacttgtgtacgaattttgcctttggtcctgtttgaataaccaatatttgcctaagcaaaaggtcttgccacaaagtgtaagcttaaggtagtggaaagctatggagctcaacctaccagggtttcagtcctgttacttaccacgtggtttttggatttgtagaatgggtatcaaaataacacctacctcagaaaggattgctttgagtattgaaatagaaaatacattggaaacacaaaagagagttacccaccctccttctctgttcagcttctttcccattagatccacaccccatgccagattggaaatggcttaggaggcatgcccatttgccacaggcgtcagcaagtcctgtttacattctccttgagcaaacagtggccattgaacaccctcaactccaaaacaatcagggagagaataaacccattattatagtattcatttggcaatatgaactgatcaaacaagtttgggggcttccaaccccaaatggtgaaaaaccaattcaaggtagaccagctcttctctgttctttttttttttttttttttttggtgagacagagtctggctttgttgccaggccaggctggagtgcagtggcatgatctcggctcactgcagcttccacctcccaggctcaagcaattctcctgcctcagcctcccaagtagctgggattacaggcatgtgcaaccacacccggctaatttttgtatttttagtagagatggggtttcatcatgttggccagggtggtcttgaactcctgacctcaggtgatccacccgccttggcctcccagagtgctgggactgcaggcgtgagtcactgtgcccagccactcttctctgttcttaatcttcatacgaatttcttgtgagctgatgttgggtgttgatggcaggactcttatcaggccaaggctgaccctaatgacaataatattgttccagccttgttcgtgaaagctgaggcatccctctggatgtaatcaggaaacggagaggtttagcttgaggcctaaactgaagtggcaaagtgggagttctagactgctggacatgtgctggggcttggcattcctctcacagttttataataatcagggtcacaaatggaactaaacatcctgtatgatattcgttttcatgaatcgtttctttagccaaggctaagtgctgactgcgagccaaaggagcatttcccaaggtgcagtgaagcaaatcaaaccaaagaggagcagaaagctgcctttaacacgctctaccttatcctgaggctccagggctaattggcctcaaaggggttccccagtctatattgaaaagcccatgggttaggaatctagcagacatggattggaataaaatttgttgaatgagtgatgccatttagtaaggatgctactttgagaagttaattaacttctgtcagcatcaaattcctgatctgtgaaatggggatggtaatacctatctcacagggctgttgtaggaattaaattaaataaaataacatgtgaagtgcctagtacatacccttgatatatcataggtacttaataaacgttggtaggaagaacagttaagtacacagataatgacgtataaatgacgtcataagattaacatgtggtaaacaatgcaggagtggcaatatagaggatgataggaaaagaaagaagaaaactaattcagggcggggcacagtggctcacacctgtaatcccagcactttgggaggccgaggcaggtggatcacctgaggttgggagttcaaaaccagcctggccaacattgaaaccctgtctctactaaaaatacaaaattagccaggtgtggtggtgcatgcctgtaatcccagctacttgggagactgaggcaggagaatcacttgaacctgggaggcggaggttgcagtgaactgagattacgccattgtactccagcctgggcgacaagaatgaaactccgtctcaaaaaaaaaaagaaagaaagaaagaaagaaaattaattcaaacagttggcacttgacctgcttctgtgattgataatcagcagcatttcagtaggcagagatggaggaagggtgttttctagatagagggaggagcttgacgaaaggtccacatgtggaaaatgcaaatgatcctgggacttgcaagcagaccagctggctgaaatgtgcaatagtgtgagatacaaagttgataaggttgaaaaattctaaactaagtggagaatccctgaaggatttctggcagagatagcagcctaagcagaatggattagcatgaatataaagtaagcatggttgaggtgggccaacagatgagagcagagagatgaggcaaggagaccaatactgaagatattactgaagtcaaggaggaggttaataaagggactgcactgggatgggggcagtggaatacatggaaaggcgtctgtgtgaaaaacatgctgacggtggaggttagaggatttggcaactgattgatggtgtagggtgatggtgacgggcgggtcaaggatttttgtaaggattttggagtgggagaatggtaggagttactatccaaaatgcagaaagaacagctttagggagcagagtgttccctgttcttagttctgatgtccctgggatcagcccctgtagtcaggggagaaagtcctgagcctttggcacgctacttcactttgtgagcacagtgtctaggcttttctgtttcctcctgtatttggttcttctttttttttttttttgagacggagtctcgctctgatgcccaggctgaagcacaatggtgtgatctctgctcactgcaacctccgccttctgggctcaagcaattctcctgcctcagcctcccaagtagctgggattacaggtgcccgccaccatgcccagctaattttgtatttttattagagatgggatttcatcatgttggccaggctggtcttgaactcctgacctcaggcgatctgcccgcctcggcctcccaaagtgctggcattacaggagtgagccaccacacctggcctaatttttttttttttttgagacaagatctggctctactctgaaggctggaatgtggtggtgccatctcagctcactgcaacctccccctcccaggctcaagccatcctcccatctcagttgggattacaggtgtgcaccaccatgccctgataatttttgtagttttggagagacagggtttctccatgttgcccaggctggtctcaaactcgtgagctctagtgatctgcctgcctcggcctcccaaattgctggaattacaggtgtgagccaccgcactcagcctgctttttttttttttttcacatgtatgtctctctaaacaatcttatttagatctgtttatttttgacctttgtaaaaatatattgcattgtatatagagttataacatttgcttttctaactcaacactaagcttctaaactcatctacgttattgtatgttactatattttgtgcattttcggtgttgtaaaatactcctttggtgaatattccacgatttaaaaattagttttcctgttaatagacatttgggtttccattgttttgctatttcaaacaatgctgctatggacatttttgaacctgtcttctggtgtgcaggtacacgtttcttgaaggtataagcctaggagtggggtgctgggttgtgggttgtgtatagattcatctttacaggagaatgccaaattgttttctgaagtgagtgaattaatcataatttattcttcagtgactccagagattgggattctattaaggaccttagtcaccactatggtctgatgtttgtgtcccccctaaattcatacattgatacctaatcctcaatgcaatggtattaagaggtggggcctttgggaggtgattatatcctatgggattagtgcacttataaaagaggcctgaggggctgggcaccatggctcatgcctgtaatcccagcattttgggaggccgaggcaggctgatcgcttgaggccaggagttcaagaccagcctggccaacatgttgaaaccctgtctctacaaaaaatgcaaaacctagctggtgtggtggtgcatgcctgtaattccagctacttgggaggctgagacacgagaattgcttgaacccaggaggcagaggttgcagcaagccaagatcacgccactgtactccagcctgcgtgacagagcaagactctgtcttaaaataaaataaaataaaataaaataaaataaatacaagaggcctgtatttttgccccctccactatatgaggacacgtagacagcaccatctctgaggaatgggccctcaccggacgcctaatctgctggtgccttgatcttggacttcccagcctccagagctgtgagcaatcaatatccattgtttataaattacctagtctatggtattttgttatagcagaccaaacagactaggcagtcactttagccccagacataccaagttagggcttaactgtggggacactctctcttcacaagtaatgctgtttcttcagagctcttgggggtcgtgtttacctagacttttacagctttcttcagttttcagttttgtaatctgatgtgtcgcaggtgggatgagttttcttctattttggaaactggacagatgaattctcattcagatcactcactaaatagagtccaggtgaaagcaacttctagggccaggcttctggaaattagtagcatcttaaggtgtcaaggtaggtaacatcttagggtaaaacagaaatgtcactcaataagagctatctactgctctctattctatctgagaggagtcttagctattgtaacgtctttcagggaagtgccctgtgggcaaaaataacgcttcgtatccagatttggtacagtttacaaaattttgaaatttttggtacttttttggtccctttttgcattctgtatttcttgaattttttttcaattttttttgagatggagtttccttcttgttgtccaggctggagtccagtggcgtgatctcggctcactgcaacctccgcctcccaggttcaagggattctcctgcctcagcctcccaagtagctgggattacaggcatctgccatcactcccggctaatttttgtatttttagtagagatggtgtttcaccatgttggctacactggtctcgaactcttgacctcgggtgatccacccccctcagcctcccaaagtgcgtgagccactgtgcctagcttttgaattattacattaagaaagtatcattgttataaaagcaataaggttattttaaaatagtattcaataggccaaaagggaatatggaagtaacagccttgaactcgtggcctcaaaggattctcctgcctcagtcacactttagagtttccctttacattcaggatgaatcctgaaaagaggggtaatgctgccttagacactggagggactaaactctgacaaaagaacattaccaagaactatctagccttgtgaaatttagacaatttctgcaaatatggatctttcatactccagtggcccaataatggaggtcttctttgcctgtgtattacttttttttttttttttttgagacagagtctctctctgtcacccaggctggagtgcagtggcatgatctcagctcactgcaacctctgcttcccgggttcaagcaattctcctgcctcagcctcctgagtagctgggattacaggcacccgtcaccacgcccggctcatttttgtattttgggtagagacagggttacatcatattggctaggctgatctcaaactcctgaccttgtgatccgcccaccttggcctcccaaagtgctgggattacaggcatgagccaccacagctggctctttttttttttttttgagacagagtcttgctctgtcactcaggccagagtacagcggtgcaatctcagctcactgcagcctgtgcctgtcgggttcaagcgattcccatgcctcatcctcccgaatagctgggattacaagcgtgcaccaccacactctgccatgttggccaggctggttggtgttgaactcccaacctcaagtgatctacctgcctccgcctctcaaagtgctgggattacaggcgtgagccactgtgcccagcttcagataacctttccattaaaaaaaaaaaaaaaaaaaaggcaggatgtagtggctcgtcccggtaatcccagtactttgggaggccatggccagcagattgcttgagcccaggagttcaggaccagcctgggcaacatagcaagaccccaactttacaaaacagttttaaaaattagctatgtgtggtggcccacgcctgtagacccagacactagggagactgaggtgggaggttcacttgaacccatgagttaaagattacagtgagccgtgatcaagccactactctccagcatgggcaacacagtgggactctctctttaaaaaaaaaaagagactgggtgcagtggctgacacctgtaatcccagcactttgggaggccaaggtgggcagatcacttgagctcaggggtttgagaccagcctgggcaacatggtgaaaccccatctctactaaaaatacaaaaattagctgggcatgatggtgtgcccctgtggtcccagctacttgggaggctaaggtaggaggaccatttgaacccaggaggttgaggttgcagtgagccatgatggcaccagagtaagaccctgtctcacaaaaaaggtagggggatctgtattagttagcttttgctgtataacaatccaccctgaggcttattgtcttaaacaggaccccttgtttagcccacaatcctgtagtttgactgggctagggcagcgtggctgatctatgctgggctcccttgtgtgactggtcagctggtagattgactgcaagccagattacctaaaatgcttcacccagaggtctgacattgacaggctgttgggagcccctgcaaagtcattatgtaggggcatacatatgggggatgggaagaatatgttgccatttttgaagcataccactaggaaaagcagagttgatacaaataaccaaccactccaatggacctatagttataaatgtggctaattactaggaaagaaaagtaaaggatatgagagattattacaaagatacctactttacagtatgccacaagatcttttatatactttcagcatctttctataaagacgacatatgaatatttttaatcaccgtatctgttggtatagatcactgctttgggaatgcagcaagaaaactacagcaccatagtcaaattgcatagtcaaggaaaagcatacaaagtgttgatttgaatgagatgaactttaaatttctctattcccttttggcttattgaatactattttaaaataatcttattgtttttgcaacaattatactctcttattctaataattcaagaaatacagaatgcaaaaaggaccaagaaacttacccagaatttcataattggttaagctcattgtaaacatttcattatatctttccagctttctctccatacttatagactttctagacctctgtatgtatggatataaatatatacttttttttgagatagagtttttctctatctcattcccaggctggagtgcaatggcacgatcttggcccactgcaacctccatctcctgggttcaagcgattctcctgcctcagcctcccaagtagctggtactacaggcgtgggccaccacgcccagctaatttttgtatttttagtagagacagggtttcaccatgttgcccaggctagtctccaattcctgacctcaggtgatctaccccctcagccttccaaagcgctgggattacaggtgtgagccaccatgtctggccataaatatgtaattatccataagtgtgtttattccacacatgctctttcataacctacttttttcatgcaataatattgcagggggcattgctacatgttaataaatataggtctacatcatcatttttctctttaagagaaggagtctcactatgttgcccaggctggagagcagtgactattacaggtgtcatcatggtgcagtataaccttgaactcttgggctcaaggtatcctcctgcctcggcctcccaagtagctggggctgcaggcttgtgccaccacatctagctactttattatttttaaggctgcatagagttccgtaggctgtatataatataatttatataactaaccaattcagataaccaaccaatttctattagaatgaagaatactgaagtgaacacttgcatatatagttgtaaacatttgctcaactgtcattcagttaactccttaaattatgttcttagaaatgaggattctttgaccaagggcatatatatttcatattgttccctatttctccatttatcttttggagaaattgcatcaatttttacttctcattaaccttgcacaccgtcaccttttctcacatccttggcaatgctatcaatcctttaaaactttcataaattaataggcaatgcacatgcatactgcattcttggtccataactgaggaatcccacctgttttcaaaaggaccctactggagctcccaagtgacctcagagcatttctaggggttattacttcagttgagggagattttctggctcctcactctaccactttcgattccttgtgtgtggtctctcttttttttttgagagagacagaatcttgctctgtcacccaggctggactgcagtggtgtaatctcggctcactgcaacctccacctcccaggttcaaatgattttcctgcctcagcctcctgagtaactgagattacaggtgcccaccaacatgcctggctaatttttgtatttttagtagagatggcactataccatgttggccaggctggtcttgaactcctgatctcaagtgatcaacccacctcggcctcccaaagtgctgggagtacaggcgtgagccaccatgcccagctggtaatttttgtatttttttagtagagatggaatttccctatatgttggccaggctggtctcgaactcctgacctcaagtgatccagcgctccttggcctctcaaagtgctgggattacaggtgtgaaccaacatgcctggccaagcagtctgttttttttgttttgttttgttttgttttgttttaagacagagtcttgctccgtcgccaggctgtagtgcagcacaatctcagctcactacaacctccgcctcccgggttcaagtgattctcctgcctcagcctcccgagtaactgggactacaggcgtgcaccaccaggcccggttgtatttttagtagagacagcatttcaccatgttggccaggatggtctcgatctcttgaccttgtgatctgcccgccttggcctcccaaagtgctgggattacaggcgggagccaccacgcccggccaagcagtctgtttttaatcctgcacaatctggatacacagtttagcacttcctagggtgataagaatgcatcttcatacataaaaacacacacaccaagcaaaaaacaccaccactacagcaagatgacactaatgagcaatggactttttttccaggaggaaaagttttaatttattcacagaaatagcataaaaatccccgtacatcattcttaatcttccaaatcccttctcagctgcttcccctccacccaaccaggagtgaagtgttccatccttctcccacactacgccagcctcctctcttctctttcacatttccccacttaggtggtcccagggagaagctcatttggcttgaaaagccaagttgttactcacaaataaccattccaatcgacttgcagttatacatttcattaagtgctatgcaggaaaagtgaaggctatgatgagagattatttcaaggagacttagatggggaaagtgagagcaggcctttctgaggagtgagtttaagcatggatctgaagggtgtggaagagttgggcaggcaaagataagggacaaactcagcctggtgctcagaggatggacagaaggccagtgtggctgaaccacataaacttacacttgtaaaataaaaaagtgcaaggccaggtacagtggctcacccctgtaatcccaggtatgatccttaaaaaacaaagcaagcaatacaggaaagtacaagtaaagaaaataaaaatttatcccaattttaatcactgagaaataattctaaaaaagcactttttttttttgagatggagtctcgctctgttgcccaggctggagtgcagtgatgcaatctcagctggctgcaacattcgcctcctgggttccagcaattctcctgcctcagcctcccgggtaactgggattacaggcacgcgccaccatgcccagctaatttttgtatttttagtagagatggagttttttcatgtcacccaggctgttctcaaactcctgacctcaagtgatccgcctgcattggcctcccaaaatgctgggattacaggtgtcagcctccgtgcttggcctgtagcatggatctttaatgagatcattagccctctccatctgtggtcagctgacaggcttggacagctttggctgtgaggaaggcgaagagtgctgatttcaccacggaatcactgagacatggagggccaggctcaagagcttgtctgctttatcaagctgccagcttgtccggatcagggcagatgggccgggtggagaattctgccaaattttttgaaaacaagtcaaactcttcctttcctcagtctgtattgtccctctggtgagtgataaaaattgggctgtttgtcacatttctttcttaagctctccttctatgtcataccagataaaagaacacaacagataattatagttagtgcttgacagctgctgaaaatacaaaaatatattctcatatttcctgggccctccactgttctaattcttttttttcttttcttttttttttttttttttaagatggagtcttgttctgtcaccaggctggagtgcagtggtacaatctcggctcactgcaacctccacctcccaggttcaagtgattcccctgcctcagcctcccaagtagctgggactacaggtgcacgccaccatgcctgactaatttttttgtattttagtagagatggggtttcaccatgttgaccaggatggtcttgatcgcctgaccttgtagtccacctgccttggcctcccgaagtgctgggattacaggtgtgagccaccgcacccagccttcaaattctttcaagtctgagaaggctgatatgatgttacctttttattttatttatttatttatttttttgagacagcgtcctactcttcacccaggctggagtgccgtggcgtgatcactgttcacggcagccttgagcttctgggctcaagtgatccctcccacattagcctgagtagctggaattacaggcacatgtcaccacacttggctaatttttaaattttttcagagactaggtctcaccatgttgtccaggctggtctcgaactcctgggctcaggtcatcctcccaccttggccttccaaagtggtgggattgcagacatgagccactgcacccggcctgctttttttttttttaagtcttttctttgagacagagtctcgctctgtcaccaggctaacgtgcagtagcttgatctcagctcactgcaacctccacctcctgggttcaagagatcctccagccttagcctcctgtgcagctgggattacaggcacatgccaccacacccagctaagttttatatttttatagagacagagtttcaccatgttggccaggctggtcttcaactcctgaccttaagttatccacctgccttggcttcccaaagtgctgggattccacgcatcagccactgcacctggccttattaaaggcacttttaaaagatccacaaaactatgcagcatgaaaaataaaataaattgagtttcataggcctagaatgtggttttctaagtatgaaccttactgctaatacaaaatgaaaagcaaacagaaaaattggactctaattgtaataaacctgcatgctaattggggcatccttttcctgacctgatgcaaaacaataaaggaaaactgaaattggctaattttgtgcttgaaatcaattactttgacctcccatcccaatcacatgaaaatagagtggctagtaacccactctggggagtgtcacctagatataaaactgtaacttcataacattgctggtgttgaggtgaatcttagtggtcatccagtcccaaggcatccttgccagccccctacaatacctggatgggcgcttatcttcaggtaggcctgagcctttctggtaaagaggagctcactatttctaaaggaaacctgtgccattgggttaaaaaagtattaatttttaaacattggtagttgttaagcagttgttgaatattttgagccaaaatttgttacctccctttctagattttacatgcttcagaattttctcctttaggtttgagaccagagcccaagtggatctaaacaggctctttgtaccactctgcaaattctctcattttctgttgcccaagaccaaggatattatctccatagagtgccatttcccagcttattaaataagagaaatcatcagtttcttaaaggttagactgagaacctgagccctgaacatttaacatctacctgtagctcattctgggatacatttaagaaagtaatcatcagagtattttacagtttgaagatgtcagtgacagattgcctctggggctcatgggtcatttgtcatgtttttaccaaatagttatttttcctcttatagttttaatttttaatcctctgaaatttaaaataaacccctcattaagtatttattaaacataatggactgaaagagacatagaagaattatatgatataaaaccaactttggcctgggagcggtggctcacacctgtaatcccagcactttgggaggcctaggcgggtggataacctgaggtcaggagttcgagaccagcctggccaacatggtgaaaccccgtctctactaaaaatacaaaaattagctgggcgtggtggcacacgcctgtaatcctagctacccgggaggctgaggcaggattcactagcttgaatccaggaagtggaggttgcagtgagccgagatggtgccattgccctccagcctgggcgacagagtgagactccgtctcaaaaaaaccaacgaaacaaaacaaaacaaaaacacacgcaaaaaacccaactttgatggaacacacagcctttaagggaacaagtggttgccagcagttacagagatcaagtgcatgatagaatgaggccagttgggaaggagcagtggacagagcgcagcctctggagacgggcttcataccccagttggagcttccctcactgtaagactcaggcaaactgctgaatctcagcatctcacttaccaaaggagctaatcctatttaatttgaaggaccactgtgaaaattagaaaggagaaataagacgtgcactagttatattagttaccttgggctgcctcaacaaagtatcacaaactgggtggtttaaagcaacagaaatttatttccttgtgttctgcaagccaggagtctaaaaccaaagtgccagcagggccatgcaccctctgaaggttctagggaagaaccttccttgcctcttccagcctctggtggttgccagcaatccttggcctttcttggcttacagctccatcactccaacctctgacttcactgttacatggccttcctcttgtgtgtgtctctgggtcttctcatggcataaggccttgaaatttgggcccatcctaatccattaggacttcatcttgactaactatatctgcaaagacactgttccaaagaagattacattctgagctccagggtgggcaggaattttggagggacactatacaacccagtgcaccggcacgtagtatagactcaataagtagaagctgttatggttatcaagtgccaaagtgccaatgagcagagaaaaattatttgtatgggttggagtggttaaggagagcttcacagaaggagtaagagtcacggagggcttcaaagaagtactaaaatttagataagaactaaaaatatatagagtctctcaggtggaaagaatagcatatcaatattttattttatttttaaaattatatatatatttatttttattgaaaatagagacaagggctcactctgttgcccaggctggtctccaactcttgagctcaagtgatcctggcacctcggcctcccaaagtgctaggattacaagtgcaagcactgcacccggccagcatatcaatattttaaaaatagagttattaaccttgtaaaatcagctactcatgagacagaaatctcctttggcccaataatgggaattaaaaactataatctttttcaaaatggtttaactattaatgcatattttagttacctattgcttcctaacaaattaccctaaaacttagcagcttaaaataacaaacatttattaatattagctggacatggtgacgtaaatctgtagtctcagctactcgggaggctgaggcaggaggatcacttgtgcccaggagtttgagaccaacctgggccgcatagcaagactctctctctaaaaataaataccaaatacttactatctcacaatttctgtggacaggaattcaggagcagtttagctgggtgattctggctcagagtctcttaggaggttacagtcaagatgtcctccagggctgcagtcatccaaaagcttgtttggaacttgaagatccagttccaagatggttcactcacacagctatggcaggggccttggttcctcaagcatggcctcctccattgggctgcttaagtgtttttatgacatagcagccagcttcctccagagcaggtaatcagagagagagcaaggaagatgccaccatgccttttatgactcaatctcagaggtcacacactgtcacttttaccacattctgttcatcaaaagcaagtcacgaaattcagtgcaccttccaggggaggaggatgaagctctaattcctgttgaaaggagaaccacaccatggcgtataatgaaagcatccattcctttagctgttggtctagtttccggcagtggacgttcttaaatctccatgttattattattatttgttaataaaataatcattttgagcactcgcagtgtgccaggtgctgtacttgaagctgggaatttggaatgaattggtccagtgcttgccctcgaggggtttacaggttagtgagggaaagggaatagtctgtaaatataatgcacgtatataagagataaaagtgaatataaacagagggctttgcgtttgcaactctaagagggaaactgaagaaatcagagaaagcttcaggggccggaggcatctgagggcctagggcagtacccaaatcttagcccaacccctggtatagagtagttcctgggcaggtcattgaagagggacatttgtgcctggagatgggaatgtgtaggacttgtaggtgggaatgtcaggttgtccagggtcactttaatggaagggggagaaaaggaagagtttgaggccagacttggaggcccttggagaatgtggtaaggagaaagattagacttgattatgaacacactggagaatgacttgtgttttttgagcaggggagtgatatgcttagatacttgttttggacaacagaaaaaaatggagccagaggaactaatatctttgtgtatatgaacttattcatttattcaaaatttattgcagaccaaccaggcttttttttttgagactgaatcttgctctgtcacccaggctagagtgcaatggcatgatctcagctcactgcaacctccgcctcctgggctcaagcaattctcctgcctcatcttcttgaacagcttggattacaggcatccgccaccacatcccgctaatttttgtatttttagcagagatggggtttcaccatgttggccaggctggtctcgaaatcctgacctcatgatctgcccacctcggcctcccaaagtgctgggactacagctgtgggctaccgcacccagcctgccaggcattatttatagagagcttgtagtctaatgggagaggtacatattaatcaaatcatataaggataaaatgacaactttgacagtgctacaaagaaaggtacatggtgcaatgagagcacatattaggggatttgacttaagccaaaagttcagggaactcttctgagacaatgataactgagcgaggcctgaagaatgtccagaagtaataagccatgcaagggtagggatcagcacaggcaaaggccctgagatgagtacaaaggacccaaggaaggccagtgtaatgggaggagcagagacagaaggaaggagaccacagttagaaataaggtgggagaggaaggcaaggatcaaaccatgaatggtcttaattaactaatgaattaattgtgcccctatctacaaggacttcggtttttaggaaatacctccgtcaaaatagtaaaatctaaatataaaataaaaattatggcagaaaaaaatacaacttaggatcaggtatggtggttcatgcctgtaatcccagcattttgtgaggccgaggcaggaggaccacttgagtccaggagctgaagaccagcccgggcaacatggcaaaaccctgtctctacaaaaaatataaaaattaaccaggcatggtggcttatgtctgtggtcccagtaacttgggaggctgaggtgggaggctcccttgagcctgggaggttgagggtgcggtgagctctgattgcaccactgcactccagcctgagtgacagagcaagaccttgtctcaaagaaaaaaaagtacaacttagaatgacaaatgcagaaagaatcattacatgaatatatgaatgctatataagcaaatggactggaaacttgaccctgagctttctagtggccaaagtagaagccaaaaaaaaaaaaattagaatatgtagtgctcacagcccatgaaaaaaaacatgggaaaatcatttagcaggcaggtgcaacagaaagatgtactgatggtctgtctgtggcatgagaatggaaaagacaagcaacattagaggaagacattgcagagagattcaccaattagttactatggttactgagactgtagtatctccggatattatctcccagtatctaccgagattattatgggatcaatgattattatttctccatcatatatgtgtgaagtagaagtggaatctatcttattttttaggccagggtaattttcttttgtctcaaattggaatagcaggggatatgtttaattactgtctatgaaccattatagaagttggcactacttagagtgggaggaaatagatagcttgtttatcagtgggcataaaaataaagaaatggcaagatttgtcctgtttcctcctgtgcctgctaaaaagcagaaggatcatctgaggccttcctgaaaattagggagaatggcatcctgtcttaatttcttccaccaaatttcacttttggatccaggccatttctactttggcaaagtgtgaggtgctaatgtggactcctgttcccagtgatgttgcgccagcctggcccaggggaactgtcagtgcctggtcatgggtgggcggaagtgggagggggcagaggagtgctgttaacactttcagtactgtataaaggagcacttccttttattccttgtagcagaagccacctgagaaagtgaacttaggcaaatggcttgtgcttgagtgttctcctttagattctgttcttttctccaaatccactcctgccagcctcacctctccttttcacagtggtcaatatcacagtttcccggaggaaacattgaaggcgactcaatggcactgcttcctcctattgccatagctttgggtgttttcagattttactctgcaaagcctcataggttctccaggtggagcccaatggtgaagccctggtgtgggcttcttgacctcacagggctgtgggcctctcccctctggctggcatctggctgctctcttccgccaccaagacccccaagaagaaaagtagcttcctctaaaaccaggttattcctgcaaagcttagtcctggccctctgtgtaacataaaaaagaacatctgtccagtgaacagccagcttttatggcagtgccccgttggcctactgataagaaaccgtggctgctcaggcggctgctgcacctgctgcttttgccgtttctttcctgcttgtgtagataaagccctgcggagctgagctggtttcaccttcgtcattacaactttgaagccctctggaggctttaacaacatcttgccagtcttatcctagagaggacagctagttctccttgctaggtgggaaggctgaagctgaacttgggaattctcatcagggctgcccataggaggtctcatcatttccagcagaggaaagaaacttgaagaaagaatggatttaagtaattgcctccaggcagtcttctctctctcctccctctctttaaaaaaaatcatgggatcatgtaatttttcagcataaataatggcaataatggttggaggacaaggtaagatttctggaaatctggcaactacgcaggtgactcaaaagaaaaaataatgaccaagctaatctttaactccacacctactcttgccttttcccaggcagcttcctggtttagagcagggttcccaaactgcagtaggtatcagcatcccctggagggctttctaaaacccagattggtaggcctactccagagattctgattcaatgggtcagtgagagaggcctaagaattcaaatttcttttttttttcttttgagatggagtctcgctctgtccccgaggctagagtgaagttgcgggatctcggctcactgcaacttccacctcctgggttcaagcgattctcctgcctcagcctccccagtagctaggattacaggcacgtgccaccacacctggctaatttttgtatttttagtagaaacggtttcaccacatgaccaggctggctggtctccaactcctggccttgcgatccgcccaccctggcctcccaaagtgctgggattacaggtgtgagccaccgtgcccagctccaagaattcaaatttctaacaagtctccaggggctactgctgctgctgctgcccccacaggtcctgaaaccacactttgggaaccattggtttaagctttatggaaagtacaagagctttgaagaaaggcaggcttgggtttcaatcctaaatccgtagcttatataccagctgtgtgactgggggcatatgactgaatatctcttaactggtttcttcacttttaaaatgggggaaatcatatctactccatagagttcattgattctacaaatcctgcagtgccaggccctgagctgggtggtgggacgagacagtctttgatgtcaaggatctctgggtggatatgaaaattaaagagataaaatgttcaaagtccaaggaccatgagggatgcccaataaacattaattttatttccttcaaggaggtaacatgattctgcttttcttttctttttttcttttttttggtctaagaagtaattctcaaatttcacagcatggaacaaagagctatgcttctccccttatctagatggaaaatttgaggtacaggtactgttttgagttcaattgtgtccttcaaaagttcatatgtaccttagagtacccgctgtgtgccccagcacctcagaatgagaccttatttggaaatggggtctttgcggatgtagtcaagttacaatgagatcattaggttaggccctcatccagtatgaccagggtccttataaaaagggggaagtttggacagagacgaatgcacagggaaaatgctgtgtgagagttggagttatgctgccacaagccaaggaaatcaaggatggctggctgtcccccgaagccagggcagaagcaggggccagattctcccttgtggcttccgaaggaaccagccctgccaacaccttgattttgggcttctggcatccagaactgtgcgacaacaaatttctattgttcaaagccacccagtctgtggcactttgttacagcagccctgaaagacgaatgcaggcaccgtgaggtagaacatccctcgcgaacagggcacattgaggagaggtgaaggaggacttccagtttttaatcccacacatctctttattgtgcttgtgatttaaaaaaattaattgtaggtataattactgctaaataccctgaaaataacgaactcctgtgtctctagatatttaaacctctcagttagcaacagcctctgaccgtgtgtccatctatcagggaattcttcaaaatagtcatggagtgtctgtttgcaggcaaagcacatttagacgtttaagtcacagacacacgtgagtcaaataatttaccatctaactgggaccaggagaactgaacagtaacaacatagcaaggcagtttgtgatctttgccccatatccgttgtggaggaggggagctcccaccggccagaaggattaggggccatatcacaaaggacggggaaaagggcacttcagccaggactggtgagtttgaggggtgaaggggaccaggcagggcattctgtggggtaagggagcaggtataatgccctcttctgatgcttttacttagagtttcagttgcaaacccatgtcactctggaggggtaagtgataaaggcaaggtgataattttttaaaatatttgattatttatttatttattttgagatggtgtctcactctgttgcccaggctggagtgtagtggtgtgatctcggctcactgcaacctccgcctcctgggctcaagggattttcctgcctcagcctcccaagtagctgggactacaggcatgcaccatgacgcccagctaatttttgtatttttagtagaaatggggtttctctatgttggctagactggtctcgaactcctgacctcaagtgatctgcccgcctcggccgcccaaagtgctgggattacaaatgtaagccaccacacccgacctaaatttatttatttatttattttattttattttattttttgaggcggagtttcgctcttgttgcccaggctggagtgcaatggtgcaatctcggctcactgcaacctctgcctcctgggttcaagcgattctcctgcctcagccttcctaagtagctgggattacaggcatgcgccaccacccccggctaattttgtatttttagtagagacggggtttctccatgttggtcatgctgatctcaaactcccgacctcaggtgatctgcccgcctcggccccccaaagtgctgggattacaggcgtgagccaccgcgcccggcctaaatttatttattttttaacaagtaacccacatagtaatcaatccaaaaagtataaagggacacaagaaagatcttcattcttttcttcacaaagtatacaaacttttctaattccttagctgtttctagaatgaaggtcaagttagctgaggcctagaaagactacattccagctgtatgggacagtgaaaggactttgctggtgcagaaactttatcaactagtgggaatctcttctgaaagcacctactcaggtacacctccacccaaccctgcccccagagcgtggccccaggttacagctgaacctgcttaagcaagagcctggcttctgtttgcccttaagatcaggttgaccagaggaagcctgacattttagagatgattctccactcacacatctccagttcacctggtgatggcagaggctgggtgagaatctcaattggtgacacttggtgatggctgagggtgcgtttttgtcccagagaatggcctgtgtttttattcggtgtttccttcacaaacgtgatacagataaccatagccacaccagtcactggcacagttttcattttacaggacacagaggcacctgcccaggtgtctatttggcctctatggctcggagcgctcatatatcacaggtgtgtccacagctgataagatccctttgtgaggcctagataaaatgtcaaacacagtatgaaaaactgtttctatcacctcctccctccccaccagcagcagcagcagcagcagcaggctaaaacttcctgatttcctaatgttctcatgaaggaacactttctcccctgggtcagagtcaaatgagaaacccaatgacggtgtcaggtcctgcccagggtggtgaaatgctgcttcagccttctccccatagtcccagctctgagtgtcctgctaaaggatcttctccttggttgcggtgagccgagatcacgccattgcactctagcctgggcaacaagagtgaaactccatctcaaaaaaaaaaaaaaaaagaatcttctccctaaaagagacgttaaaatttttttcaaaacttaatttaaaacaaatttttaaataggtaattcatccacatggtaatcaattttaaaagtataaggggtacagaatgaagcgtaagtatccctcctacccctgtcctggccccctagttctcctcctaggaagtagcccctgttgccttggaacttactactaaagttacctcgtggctgggcgcggtggctcatgactgtaatcccagcactttgggaggctgagacaggtggatcacttgagcccaggaattagagaccagcctgggtaacatggcaataccccgtctctactaaaaatacaaaaattagctaagtgtggtggcaacgcctgtagtcccagccatttggggagctgagttgggaggattgcttgggctgtggctaccatgagccatgatcacaccactgcactccagcctgggtgacacagcgagacctcatctcaaaaaataaaaataaataaaaataaaataaataaataaagttagtttgtattgaacaagcactcctgaggcacactgtagatactggggatacacagaagacattataacagtcttgaccacacgcttctctctctgggacaacaaaaccagagacaggagagtgctcactggccagtgtggtagtcacaacatcaaagtataatacataaagaatgaggggttcctttaaattagctttaattatttggattgggattggaggagttggattttgagccagatattgacatgaattggaggttaaaagaaaaaaagaagctagggagcattcaataaatcactttttaaaattcttgaagaatattatttctcatctgtcatggctgccaatttctatctgatgttatgtttatgtgtatatttatagcattttttttccttttttttgagacagggtctcactctgttacccaggctggagtgcagtggcatgatcttggctcactgcaacctctgactcccgggctcaagccatactcccaccttaccctcccaagtagctgggaccacaggtgtgtgccaccactcctggctaatttttgtagagttggggtttcgccatgttgcccaggctggtctcgaactcctgagctcaaaagatccacctgcctcagccactcaaagtattgggattacaggcgtgagccaccccacccagctatgtattcataacattcttattttgtagtatatatcatttatttatttatttattttaacaactgtattaaccaatgtggtatataacttataggatagtgtcttgtagactactatgtgaaaagcactccctggggttataggatgcacaacctgtacatctgtacatattggctctctatatgccaggattgtcctgactgtatttgtatcccctcactatatatttttagttgaattactttgaggtaaagtgggcagcatcacaaaccattatggctagggtgcagggttggaataaagagaggaaagactgaagaggtaagcagaggccaaagagtgaaggccctcgtaaaccttacaggagtctggccttgctcagaaggcagctgtggggcagccatacaacctgacttgcattttgtatagatcactctggctatagcctagagaatggattggaggggagaggggagcaaagcacgggaaaccagtaaggaggctcctctagataagaaataactgtgttttgacttcatcagtagcaatgcacatggagagaggtggactgactcaagaagtgttttggagatagaaaatagatagatctcaggattgtatacaagggcaccgctcctggcttgaggaggtgctgaatatagcagtttcattatcagagcaaaaggacaatgctgagactggtattttattaagtgtccagaatttatgaaatattttaaagaaataagtgaaactaaatacttaaaagcttcaaatgcattttattttatttatttatttttttctgagacagagtctgtctctgtcacccaggctggagtgcagtgccacgatctcggctcactgcaacctccccctcccgggttcaagtgatccttgtgcctcagcctcccaagtagcagggattacaggcatgcaccaccacatccagctaatttttgtgtttttagtagagacggggtttcaccgggttggccaggctggcctcgaactcctgatctcaggcaatccgcctaccttggcctcccaaagtgctgggattacaggcatgagccatcatgcccggccaaatgcattttatatattatgaaacatcaagtaaagtatacaataataaaaatataaacattacttattctaatataaattgttagcagataaaattaatgaaagtattattaattaatttttttttgagactgtgtctcactctgttgcccaggctggaatgcagtggcacaatcttggctcactgcaagctctgcctctcgaggttcacaccattctcctgcctcagcctcccgagtagctgggactacaggcgcctgccaccacgcccggctaattttttgtatttttagtagagacagggtttcaccgtgttagccaggatgatctcgaattcctgacatcgtgatctgcccgcctcagcctcccaaagtgctgggattacaggagtgagccaccgcccagcccaaagtattattttaaaaaccctgaagagccagtattgccactacaaagtggctgatgttaccactcaattagatatggaatgctgctggggagagtagctgagcactatattttatttcattttttagacagagacttgctctgtgcccaggctggagtgcaatgacgcaatcatggctcactgcagccctgacatcccaggctcacatgatcctcctacctcagcctcccaagtagctgggaccacaggagtgcaccaccacacctggctaatttttttttttttctagagatggggttttgccatgttgcccagaatggtcttgaactcctgggctcaagtgatccttccgccttggcctctcgaagtgctaggattataggcatgagccactgtgcccggcctattttgttttctttgacatccagaatacatgctggagagaactatatttttaaagttgggtctgaggtgcctgtggaatgcccccataagcagttaagggtaagaatttggagctcaagagtaagctcaaaatataatctgggaatcataaggacataaaagacaattgaaactgtgaaaatggctttgtgtaagagagttgattgaattctggcactctgaagaaagaaaaaaagaaaaattaaaatattaaaaagaacaaacaaaaaagagttgaactgagctttagaaaagactaggactttaattgaactagaagacgtataggtagaagctgaagaaaagagcaagtcaaagaaagctatgaagttaggagtaaatggatactgtcagtggtgtgctggtaaatgcttaacaactggctctctagggaggtgaaaggaagccctgatttatagtgtttgctgaattccatggtgtaaatactcccatcacagtcaatctcaagctatcagtgtcactgagcgtggagctgggaagaggtgagcacagtcagatcttgtgatctcatacaagtgtacgctggtccacagccgggcactgtcctgatggaaagaggattctgtcaggggcatgtaaaggacatacttcaaaggtaacgtggaccacataaagacagataataacaagtgtggttgaggatgtggagaaattggagccttcatacattgctggtgggaatataaaatggtatcgctgttatggaacagtttggcagttcctcaaaaagttaaacatagagttaccatatgacctggcaattatactctaggtatattcacaagagaattgagaacatatattcacacaaaaacttgtacatgattattctagcagcattattcataatagccgaaaaagtagaaacaacccaaatgtccatcaactgatgaatggataaaataaaatgtggtatgtccatacaatggattttttttttttttgaagcagtctcgctctgtcgcccaggctggagtgcagtagtgcgatctcagctcactgcaacctccggcttccgggttcaagttattctcctgcctcagcctcctgagtaactgggattacaggcatgcttcaccataccctgctaacttttgtatttttagtagagataggcttttgccatattggccaggctggtctcgaagtcctggcctcaagagatccacccgccttggcctcccaaaatgctagaattataggcatgagtcatcatgcctggcccatacaatggaatatgattcagccacaaaaaggaattaagtactgatcatgctatagtatgtacaacacttgaaagcattatgccaagtaaaagaagccagacataaaagaccacatattgtatgattgtgtttgtatgaagtgtccacaataggtaaatacatagagtcagagaatagattcgtggttgccaggagctgtgggaaggataaaatgggaagtgactgctgatgaatatgaaatatgaaaataatttcagaatatgaaaatattctgggattagatagtggtgatgcttgcacaatcttgtgaatatattaaaacttcctaaattgtataatttaaatttgaattttagagcatacgatttttatctcaatttttaaataaatggtaaaatgagtttcagctgcctgtaaaagtttgaactttttttttgagacagggtctcactttgtcacccaggctggagtgcagtgggacaaacactgctcaatgcagccttgacctcccaggctcaaacagtcctcctgcctcagctgcccaagtagctgggagtacagacataagccaccatgcccagctaatttttgtagagacagggtttcgccatgttgcccaggctgatctggaactcctgggctccagcaatccacccgcctcagcttcccaaagtgctgggattataggtgtgagccactgctcttggcctaaagtttgaacttaatcttaaggattattgggtgccaatatttttggaaagggaaggtgaattttctaaaattatatatatatatatatatatttatatatttttttttttttttgagatggagtttcgctgttgttgcccaggctggagtgcaatagcacgatcttggctcaccgcaacctccacttcccgggttcaagtgattctcctgcctcagcctctcgagtagctgggattacaggcatgtgccaccatgcccggctaattttttgtagagacggggcttctccatgtttgccaggctggtctcgaactcccaacctcaggtgatctgcccaacttggcctcccaaagtgctgagattacaggcgtgagccatcgcacccagactaaaattatatttgaagaagtgacgagagtagattgaagagttctgaagcccgaactttgactttttgatctcattcttgaataattttcttagaaatagaattctaggtagggtgcagtggctcatgcctgtaatcccagcactttgggaggcagatgtgggaagattacctgaggtcaggagttcaagaccagcttgcccaacatggcgaaaccctgtctctactaaaaatacaaaaaattagccgggtgtggcggcatatgccagtaatcccagctactcgggaggctgaggcaggagaatctcttgaacctgggagacggaggttgcagtgagcccagatcgtgccactacactccagcctgggcaacaagagccaaactccatctcaataaaaaaaaagaaatggaattctaggattggccttttctctcagtactttgtttatatttcccattttctcctagatattattgtattgtgcagaagtttgctgtaagtataatttagtatttttataggtattttgtcttttatctctgcttgctttaagaatcaaacaacttctataaacaaaaccaaacatatattatatatcatgcatatacataatatatacatttgttatggcttaaataggtctcctcaaaattcaagtgttaccaatgtgatatattaaaagatgaggtctttttttgtgatctgcttgctggggaaagggtggggcctttaagaggtgattaggccgagtggatctctcccttgtaaatgggattaggtacccttataaaggagcatgacaggggcagtagatcccttttcttgcccttctaccttctgccatgtgaggatgcagcaagaaggctctcactagacaccaaatgcttgtgccttgatcttggacttcttagtctctagaacggtgaaaaaaaatacatttctgttctttaaaaatcacccagtgttaggtaattaattgtagtagcacagacagactaagacaatattcattgaaatttaaggctgggcacagtggctcatgcctataatcccagcactttgggaggccgagatgggcctatcacctgagatcaggtgtttgagaccagcatggtcaacatggcgaaaccctgtctctactaaaaatacaaaaattagctgggcatggtggtgcgcacttgtggtctcagctactcgggaggctgaggcaggagaatcacttgatcccaggaggcggaggttgcagtgaaccgagatcgtgccactgcattccaacctgggcaacagagcaagagactctgtctcaaaaaaaagaaaaaagaaatttaaaactcggtggctaggttcccttgcagatttgaaagagatgactagataatgaagtggatgactatgaagaaaacattactccatgcagcatagagagagatggaactgggactgcagttgctgggactacagacatgtgccaccatgcctggctaatttttgtactttttgtacagacaaaagacagaatagaatgagaaatagaatagaaatagaatagaatgagatggtccaacttacatctagtgggatttctgaagagagaaagaatagcaaaagcaggaacaaaggcaatattcaaagagaatatgtctaagaatttcagaattaataaatgataagaatctcaggccagcacagtggctcacatctataatcccagcactgtgggaagccgaggcaggtgaaacacttgagctcaggaattcgagaccagcctgggcaacatggcaaatccccatttctactaaaaatacacacacaaaaaaattagccgggcatgggggcgcatgcctatagtcccagctactgaggaggctgagatgaagaatcacctgagcccagggaagtcgaggctgcagtgagccgaaattgagtcgctgcactccagactgggtaatcagagtgagactctgtctcaattaaaaaaaaaaatacaaatctcgattcaaaaattaagaattccaggccaggaagaaaaagataaatccatatctagatatatatcagtgtggaagctgtgtggctctttatgacctagccttgggagtcacttagtgttacttctgctgtactttgcctattggtctaagtagtcacaagcctgcccagattcaaggaggctggagggtgtaggaatggaatctacttttgttttttctcttgctttttctcttttgagaacccacttttctaagagagaaatgtaaaaggatttgcagccacactaggtgagacagcaattgtcaacacaaatgcaaaagcaggcactgtaaccttgtgattgttctcgagggaaggtagtcatcaagatgaacttagatatgtctaaactaatattattactattattttagagatgggggtctcactctgtcctccaggctggagtgcagtggtgcaatcatagtttactgtaacctcaaactcctgggctcaagtgatcttcctgcctcagcctctcaggtagctgggactgcaggtgtaagccaacatgcctggctatttaattttttttttttcaagacagagactcactttgtcacccaggatggagtgtagtggcacaaacttggctcactgcaacctctgccacccggattcaagtgattctcctgcctcagcctccggaatagctgggattacaggttcctgccactacgcctggctaatttttttttttttttgtatttttagtagagatggggtttcaccatgttggccaggctggtcttgaactcctgacctcaggtgatctgcccacctcagcctcccaaagtgctgggattataggcatgagccaccacgcctggcctatttaatttttttaagtaacatcaaatgataacacaattaaacagttagtctaaaatgatttatccagccatgaaaagatatggaggaagcttgaatgcctattactaagtgaaggaagctgatctgaaaaggctacatactgtctgactccaactatatgacattctagaaaaggcaaaactttggagacagcagaaggatcattgattgtcaaggattatgtgtgtttgtgtgtgggggtgtggaaaaagcagagcacagacaacttttagggcaatgaaattactgtattataactatatactataatggttaacacgtgtcattaaacatttgtccaaacttatagaatgtgcaacaccgagagtgaactctaatgtaagccacgaactctgagtgataatgatgtgttaatgtaggtttatgaattgtaacgaatgtaccactctggtgggggatgttggtgatggggaggctatgaatttgtggggagatatgggagatctccataccttttgttctgttttgctgtgaacataaaactgctctaaaaaaaaagtctattattttattttatttttatttactttattttattattattattattatttgttttttatttttttcgaggcggagtcttgctctgttgcccaggctggagttcagtggcaccatctcgtctcactgcaagctctgcctcctgggttcacgccattctcctacctcaggctcccaagtagctgggactacaggtgcccgccaccacgcccggctaattttttttttttttgtatttttagtagagatggggtttcactgtgttagccaggatggtctcgatctcctgacctcgtgatccacccgcctcggcctcccaaagtgctgggattacaggcgtgagccaccgcacctggcctattttattattatttttttgacatggagtctcattctgtcacacaggctggagtgcagtggcgcaatcttggctcactgcaacctccgcctcccaggttcaagcgattctcctgcctcagtcccccgagtagctgggattacaggcacccaccaccacgcctggttaatttttgtactttcagtagagacggggtttcaccatgttggccaggctggtcttgaactcctgacctcaggtgatccgcccacctcagcctcccaaagtgctaggattacaggcgtgagccactgtgcccagccaagtctattattttaaaaaattatcttggagaatattattttgaggactcttgagaacacatatgggaactctcagggttctaaggactccatttggagaaacagtgctataggagattgagtattgcagctgctcatatctatttgctccagtagagttacagaagccctgtctgttgaactggttctccaggctagaattctgtccgccaggttctctccatcacagacagctaacatatccaaacaagcaatgtccttggagagttttgcataggccacaacctagattgcctggttctgacatgtatgattaaaagctcaggtgaaaaacatttaatagaacattttggtctcattaaaaagtgatagaagcacatcttcagaatataacttcataaagccctgccttgtagacagatgtgtgtgctatattctttcctactagaaagagattggaatttataaagggacattttgtttcttggtgacaaagccatttcaatcctagggatatttacaaccagtactgaaaaaccctctgcacctgagggactggccgcagttacagactgtcataaatgtcagcgaccagggtttctcttggagagattagctctggggagttgctaggggagaaaaagtggaaaaaggacaggtgttgctccatatgtatgagaagactgggattagagaagagggcgcgtcgggcaggcagtaaacatgacaggggaaactgaggaggggctaactgctgaggattatcacatctaggccagaaatgtcagcggggctcctttctctcagctgggagaacacgtgggtgctccctcataaaccctcttcaggcagggttagagcagtagcttttttttttttaaccagtttacaaagagcttgcctaaacataatgccctaatcatccagagaaatcagtgttactcagttttgtgggggagagctactgaactatttaatcatcttagcagggtgttaccctccctgtttatagacaagggagattgaatgactgtccccggtcatgcagcatggggtggcaggataaaagcagggtctagaccttttggctgtaatcccagcacccgcacagctcccgagctgttctagggccacaccctggcccaccattcagtcattcaacaaatacttattgaaagctactatgtcaggtgctgttctgggtgtctgggccacatccatggataaaaacaaagatctgtgttctgaagacacttacatttgatctggaatggggacggggcagaaatagacaataaacacagcaaatagtaaaggtataaagtgtgtgtttgaaggtggtaagtgctatggaaaaaaattcaaagtcatcccagatttgaaggatcaatggatcgttgagaggggggagccaattgctattgtcaacagggagctcgaggtggaagggataatattggcaacacttcaggaggcttttgtgagggctaaaggggaagaagatgcaggtacagtgccgggccccgagcctggcacatggatgcttagaggtgctcactagggtggctgttattactgccgcagtcctgtctccctcacgggactggtcagtgttttccaagaaccctcatgccaaggttcagcctaaaatagacaggcagcttaaattactcacagactggacaacgtggtcaaggtcctgcctggcccagagcgtggtgatacaaactaccccaggtccgtgtggaggccactgtctgctttgtgtgatatgtccatagctaagccagtggggtaggccctgccagggggaccagttgctgtctctgcggtttatgatcaaaatagaagctggaaagccagagtagaatagagcaatgctgaaagaaagggcagtgtaaggccagggttcccccagactcctgtagactgggagcccctgcaccccagcactgtgttgctaggcgacggtccagggattgaggacggccagcaaaggccggcaggactggggtccatttgcttcttcgactgctgctgggtctggtgcttgctctgggggagaggaggtcttaattgtaggcagaggaagcaactaattacgtgggatgactaaagtcacccttgaccctatgcgtctgcctcggtgtctgcagttttacctttagcaactcgttcaagtcaagactctggcatcctaacatttttggtgtgtgaaatttttggttcaaacaaaattttaacttagaagcatgaacaagaaaaagatattttaaaatattgctccattaatgggggactctctacttcccccttcgaaggggctggctttcttctaaaaccctagactctggagcataatttgaaaatcagtgggttaaagtattgcagccaccctgttaaaaagtaaacagccttggtttgataaaatattaagctattttaaaattactgatacatgatggcaggtggcaatgttttcctgtgtagggaggaggagggggataatagactccttagaggatctgaagtcatacaatggacccactgcccagaaaaatgcacatatctgaaattctgcatctggccgtatatgggcaatgatccatgggccataggttaaggacccctgtcttgtgggatatttgtttatgtgatttactttcaaatggggtaaatatttaaggcttggagcacagaagaatgagttttgaaaaggggaggaaggagaagaagagctagagaatcaggatcttggtggtagaggccaggaatgtgtgtttttaacatgatctccaggcagttttgatcagacaaacataggcctcagaggtctagagctggtgcacccaggccctattgagtcagcagtcctaagggagtgggaggagggagggagggaggagcccagctgcctttcccaggcttcagtgtgaccagctggagaacaatgggaaacgtcctcttccctcagccctcctcttcacaatgggacacagtgaggtcgcagtgcccctgagcctcaaccagtccatccacccaaagcctgagcagaggaactctgaagcaaaaagtacagaaaccaggagttcacaaaacacccgcaagggctgggcctgagagaaagtctcatctggggaactcatgttccaaattctgacatttctccatggttttccatgttcctatgctaagtggaattcattggtacttcccagcaaagggctagtctctccctaacagtcagggaacttttagagtttgtcagaagtaacacagagcttccattaatttggggttgattaatggaatctgttctggtctgggtcaggtactttccaggcaaagaagcatttgtaactaagtcaacaactacctattgactctgctatacccagctccagggcatttgcctggcgaccccagcctcatcctttttttttttttttttttgaggcagtgtctcactctgccacccaggctggagtacagtggcatgatcacggctcactgcagcctccacttcccaggctcaatcaatccttccacctcagcctctcaggtagctgggactacaggcacgtgccaccacacctagctaatttttatatttttttgtagagcagggttttgccatattgcccaggctggtcttgaactcctggcctcaagcaatccttctgccctggcctcccaaagtgttgggattacaggcgtgagccactgcgccccgctgctaattttgacattctccccgaagaatctgctttttagggactatgagaggagaagagaaacttctcttctgaaagcagatcctttgggaacaagggaagaagtggcctcctccagaccccaaggcatccagtctaaagttggctccagacaaaacccaggtttacttaagaacctgtttcttgacacagatcctgtcccagccaagacaaacccaagtcatgttgatcttctgcttcctttcctacttgtgactttatgcagcagtggtttttagactcagaatgtgagacacctgcttggctctgtcttttctctctgggaggtaggggaggtagggaagttgttccctttttcccaatagtctttgggtagttattcttagccctgttaatgttttactcaaatatagccatttatcaaaattgtggagttaatatttgttcatttcaatgtatataaattttaccttttaaaaaaggaccatgaggccggcatggtggttcacacctgaatcccagcactttgggaggctgaggcaggcagatcgctttgagctcaggagttcaagaccagcctgggcaacatggcaaaaccccatctctattaaaaatacaaaaaaattagccaggcatggtggtgcatgcctgtaatcccagctattcgggaggctgaggtgagaggatggcctgagttcgggagttcaaggctgcagttgcagtgagccgagatcacaccactgcactccagcctgggtggtggagttagaccctgtctccaaaaaaaaaaaaaaaaagaaagaaaaaaaggaccacgaaaaatgaaaaatgacagtctcatgtggggaggagcaggtggaggcagatgtagtggggtagagatagataaagaacggcagaaattggtgagtattgaagttgggcaatgagatggggctcattgcactgttttgtttttttaatatatatttgaaataatgtatttcaaatttgccataataggttttataaatttaccacatcaaaaagtaaaagtggaagaaaagacttagggatgtctgttttctcttagaaatctcttgatcaacaatctcaaagaaactcatactctttaacctagtaattccacttctgggaatttatctaaaggaaataattagagatacaaagaaagtgtcattgcaatattatttaaaataaggaaaaatggaacacaactccaggtccaacaataggggaatggtgaaagaaactgtgatgcggccattaaggacatgggaaagtgcttttgacctaaaattaaatggaaaaaagtcagaaaacaaaactatataccatatgatcttcatttgcatgtgtacatgcatgtatagaatcagaatctggaaagaaatacagcaaaatgttaaaagtagttatctctgtttggtggacttgtggcaggtgttttgttttgttttgttttgttttgttttgttttgttttgagacagagtctcgctctgttgcccaggctggagtgcaatggtgcggtctcggttcactgcaacctctgcctcctgggttcaagcgattctcctgtttgggattacaggtgcctgccaccatgccaggctaatttttgtattttttagtagagacggggtttcaccatgttggccaggctggtctggaactcctcacctcgattacaggcgtgaaccactgtgcccggcccagatttttattttcttttttattctagtctgtattttcatctttcctgcatttaacaggtattactttgataattatttttaactaagatgtgctattttgaaagaaaaggggccgggtgctgtggctcatgcctgtaatcccagcagtttgggaggccgaggcgggcggatcacctgaggtcgggagtttgagatcagcctgaccaacatggagaaaccccgtctctactaaaaatacaaaattagctgggcatggtggtgcatgcctgtaatcccagctactcgggaggttgaggcaggagaattgcttgaacctgggaggcggaggttgcagtgagccaagattgcaccactgcactccagcctgggcaacaagagcgaaactccgtctcaaaaaaaaaaaaaaaaaaaaaagaaaaggggaaaaagatggaagtaaggacagatttccatatcagtacccgtacaaaataataagttcttggaactggaaggaatcttagaagttgtctaatcttagaagttcaactgtctcattttacagatgaggagactgagggtagaatgaatcgaatgaccaccaaggtcttttgttcctcgtctcagagactgtttgttttacttcaccactagccctcgtatcccctgaggaccttcgcagcctggggagtgcccattgttaatccctggaggccccatttgaggggctttccagacagtctgggccatccgttgcagtcatcattggccagctgggctggagaagtgccctggcaggaagaagaaggctggtagaacagtagacctcactgccacctggtcaccttgtgcttctcccttggagtgttctgaccagtcatccgtgtcttcttagctctgctgttgcaggggttatttcgaagcaactagggtaaatgtctgggggagctggcttgtcctggctttcaaaccaccatcacttggaagagaaatgatgtggtttaatggttagtcagatcggagttagagatgtgttactgtctttgccacagtccttagacaccaagaccctgctccggagaaatgggggcaagcaacagcttgcaatggcaactaaacctctttgggatgtgtgtttatgtgtgtttatatctcctccccgtcccatccttgctagcacactccccaccacatacacataaaagctctagaaatcaacaggttttaaacaccactgcttcaccagaacctagcacataacaggccctcagtacgtgcttgttgaatgtgggatgagtgaacatcattatatatatatatttttttgagacggaggctcactctgtggcccaggctagagtgcagtggcgcatctctgctcactgcaagctccgcctcccgggttcacgccattctcctgcctcagcctcctgagtagctgggactacaggcacccaccatcacgcccggctaatttttttctgtttttttaatagagacggggtttcaccgtgttagccaggatggtctcgatctcctgacctcgtgatccactcgccttggcctcccaaagtgctgggattacaggcgtgagccaccaagcccggccgtgaacatcattttcttagaatgtagaagaacagacatattccaagttaacaatgtcttctgagatattgttcctgagctatataaacattttatattttataataaaataaaaaataaaatatattctgagacatttaaacattttaattctaaaagaacagaatgtttgaacaaaaattagcacttaatatttatttgcacaactgcaatgcaatgtttttgaaagctgtcaatagtgaacaaataagcgtgagggaacaccacagcccgggtatgtccagtgacactgctacaatgtgcactctgcctgctgccttccactcctccctctttgtatttctgagtttggccaatcatttggatggtgattaaaatatttttggacgggtgtggtgactcacacttgtaattccagcactttgtgaggccaaagtggaaggattgcttgagtccaggagttcaagaccagtcttagccacatagcaagaccccatctctgcaaaaaaatttttttaattagccagatacagtggtgcacacctgtagtcccagctactcaagaggctgaggagggagaatcacttgagcctgggaggttgaggctgcagtgagctgtgattgcaccactgcactcaagcctgggcaacagagtaagacaccatctctaaatatatatagatttatattttataaaaatattttttattttggagatatttctcaaatttagactatcagatcatcagacttttaccttctagagtactcaatagaataactcagaggttaggcatgttctctaggatctgtggtatcacctatttaaaaaaaaaataaaattgtggtaaaatacacataatgaaatttaccagcttaaccatttttaagtctacggttcagtggcatgaagtacattcacactgttgtgctaccatcggcaccaccatcgtcattatccacagaactgtcttacaaaattgaaatgctgtactcatcaaacagtaagtccccatcctgctcctctagcccctgacagacaccattctttctgtctctatgaatttgactactatgtaccttgtataagtagaatcatacagcatttgtctttatgactggcttatttcacttggcatgatttttatgtttttattctgtggagtttggttggggggcaccaaggccagccctaggtagaactgggaagtaaggaggggccttatcccccgctgccccactttcctgccccatccctccctcagttcccacccacttgaggtccctgctcagtggctaaatgtcttcatccccctcatcccatcttccacttatcagcaaagagcatctgattggcctcgtgtgggtcatgtgtccatccatggcagaggaaggtgggccacctcacttgacaatcccatcaagactctgtatgtaataaggaggcaatagttcctcccagagaggtgcttctctcagaagaaggggggtggacactgggcaggcacaaacaatagatgtctttgttgaacctccaacaaggtacaaaatgcctttccgccttcccattgcacacagctttggacttgggtcccttccccttgggccttgtttgcaaaattttttatctacttggctttccttgcagtttttagcagcttgaaagccagtgctgtgccccagacacagtatgtaagtgtgacaggagcctacacaggctgctctcaaacaccggcagccttgaaaacagattctggactcagatagcctgggtccaatcctggtttggcagttcctggctgtgtggctttgagcaagtgactttgcctctcaatgactcaattttcccatctgtaaaatggtaaaataatttaccattgaattgttttggagattggaaaacctactgtgtgatgtgcttgacctacatcatcttaatcatgctcacagagggccctatcgcacatggggaaaaggcactccctctctgggcagatgcaacacctgaatagggcataccacctagcatgcaagacttgagctagatttcaccctccactcatgccctgagctaggtaaccttatgaatagcctgcataactatacagcagcccagcccctctatgatgcaggagtttgtatatccccatttttcaatgaggcagctatggcttagggaagtcaagcaccatgtgggaaggggcggtgggatcacttctaatttgcctatttacttagggcacatgaaagaggctaacccagtccctaggactctcctccacctgaattgtggaccacatctctgtcatcagctaaccagcttaaaccttattcatcttccacagtggatggtaatgaagtacagctctagcatctaacccatagattacctccaatctctagtctataaacagttcctttttttatttgagacagggtctcactctgtcatctgggctggaatgtagtggtacaatcacggctcactgcagcctcaacctcccaggctcaggtcatcctcccaccttggcctgctgagtggctggaactacaggcacatgccaccacgaccgattaatttttgtatgtttagtagagacggggtttcaccatgatggccaggctggtctcaaactccagacctcaagtaattcgcccaccttgacctcccaaagtgccagaattacaggtgtgagccactgcgtctggcctctaaactgttactttgataatcatttttaaaagtaacagatactattttgaaagcaagtggtgggaaggtagaaggaaggacagatttccatccagataccatcctgacttgacagttttctttttttttttttttttggtcatttcagcagtccattcaatacctagacagtaaggactaaaaatattgtgagtctgagtgaattcttctagaactgaaagatcagtgttaccgacagatcagtcaatacaggcaaagcatattccagtttcagggtttttttcctcttccttctcatgtgcccaggagtattacatggctgggtgacgctacggaaggatgcgctaactacagttccccaccctctcatttctaaacccttcctttgtttttctgatgaacaggcagcacccactgcctgctgtgtcccatttagcagtgtaatttgggtgtgcgtcatagaattgtgcacagggagggggaaggagttacgtgctggatgtatatactgaacgtgtttatgtgctcctttgtagacctgcactttatgcaaattatatactttcagacagatcactgagtaaactgagtaacagatcactgagtaaactgtcagggaattgatgtgtttgcagaacgctgaatataattgaggagtcctgccagttctatccctggtttaactctctctaagcttatgtctttttttttttttttttttagacggagtcttgctttttttgcccaggctggagtaaagtggcgtgatcttggctcacagcaacctctgcccccactcccaggttcaagcgattctcttgcctcagcctcctgagtagctgggattacaggcgcgtgccaccacacctaatttttgtatttttagtagagacagagtttcaccatgttggtcaggctggtctcaaactcctgacctcaggtgatccacccaccttggcctcccaaagtgctgggattacagcgtgagccaccgtgccccgccctaagcttatgtcttgaatggtgtgatctcaaagtgtagttcagatttgaaacaggtgtattagaaccagccaccttgaattaatatccccaagtggcatgaagtaaatgagcatatattgaaagggaaattttcttaggcttggaaccaccatttcctcagcaaacctcccacctgagtgagacccaggggacatcaaatgaaagacgatgaaaagtaatggatttggcccatgtgcctctaagaggccaatgcagtcagaatgaactgagatgatcttcgaacagattagatattttaacaccaattcttgggcctcagaagtgagcctggctgctggcacacaaccaacactgtcatgtttaatttttagatttggctgttaaatttggccctgtgtgagtctgtgtttggtcagagtctataagggtggaggaggattcctggtgggaaggcctggtttctagctcagtgacttatcggctgcatgactttggacaagctatcacaccactgagagtcattttctcatctgtacaatgaaggaaacaacccctggtctacttgccttatagggagtcgtgaagatgaaacgagatggtatttgggaactgtgaacacactacacaaaagaccagcatgaatatgttcagaagcaccacacagtcctttctgccttgctcactcaattctccatttaatttatacacagtggattttacccctcattcttgcagcaaaacccttttgagagtatcattttaagaagtggattgacatcatatatgtatagttgccctatttgtcctcagagtctgagatgaggaaaagacaagaattattgggaaaaatagacccagagagggcacaaagaattcccatcctgatgttctttctttcctagatgacattgacatctacatccaaagccaaagattctggtcaagagttaatctattggctgggcatggtgttgcatgtagtggctcctgtagtctcagctacttgggaagctgaggtgggaggatcacttgagcccaggaagtcaagattacagtgagccatcatcacgccaccgcactccagcctgggtgacagagcaagagactgtctaaaaaaaaaaaaaagaaaagaaactacatctttaccatattgcaacaagtctgaaatgccactgcttctaagacaccatttttttaatgtgtcatcaagaaagaaaaagctctctatcccttaaaacataacacaattcttccttactgtgtcaattttaagacacgtcttgatttcatagatgttagatgtggaaaaagcgtgcatcttggaatagatgaaatgcagtgtgtttacctatccccaaaaataaagcttattccttttgatcctgacgcattattagattagcaaacttcaaaacttgtattttttgtcttagctccttgacgttatacatgttatgcaatcaggctatcacgtgggttaaagggggacattaattctatttttcttatgcatacagtaatacaaaatacctctgggcttgaatatagttttaggtaagtgtagattgtaaaatacttgtcagagccaaaatcatcactaattccatggtctgttgtttattaccagatttaaaggaggaagaaacgcttaagggcatttggcacatcaattgtgttttctttgttctgagtggaactgtttgttgttgttgttttacttaatgcttgatttggttgttttgttgttattccatttatttttagctcaggtaaaacaattaaactatgagtttcccattgcacagacaaattagggatgaacaggctcaagtgagagcacatcacctgcctcggccaaatatattttcataaaatgcaattgggaattcatagtctttctgagtggaaaggagcataagaaacacagggaaatagggccaggcgtggtggctcatgcctgtaatcccagcattttgggaggccaaggcaggtggatcacaaagtcaggagtttgagaccagcatggctaacatggtgaaaccccgtctctactaaaaatacaaaaattagcctggcgtggtggcactcgcctgtagtcccagctactcgggaggctgaggcaggagaatcgcttgaacccaggaggcggaggttacggtgagccaagatcatcccactgcactccagcctgggcgacagagcgagactccgtctcaaaaaaaaaaaaaaaaaaaaaaaagaaacacagggaaatagaaatacataccacttctgtgaggagcctttgtaaattttttgtggactaaggcttccatttagaacatccttccatttagaatgtcctcgttcataaattctacactttggaataagaaaaattccacctatttctagcctgttccttagttacctttcccacgttcctctgctccataaggacactacttaaacataacaacaaagagagtcacacacaaaaatgatttctagggactagaccatggctgggtggaagggaatgatccaaatcattgtagttcttgtactcggttcataatcatcagctccctgcccggggtcccagggcccatttctgagaggatgagcatcagtagccatggtgctgggaagtgggtgggaagctgttaatgtttgatcactgctaatgcacatttcgcccactgttctctcccctgcagtctgagtaccactatgagtacacggcgtgtgacagcacgggttccaggtggagggtcgccgtgccgcataccccgggcctgtgcaccagcctgcctgaccccatcaagggcaccgagtgctgtaagcagctatcctgctcagggcctccctgtcactcagctttggtctctcccccaagtctcctgccatccaatctgggcccttcctggcagagcagctgcattaaggaatcagatcttttccccaattagtccccacatcccagacccttatgagatttggtgcagaagtatttcatgaatgcaaactggatatctgaatttgctttcattttttaaaggaatttaaatcccatcagtggatacagcataagcaatgccagctgtgtgcactcagatattcttttctgtttgcatacattttcatttttgccttgtatgtctctccaatctacactcactcaccagccacaatcagtcattaggcaagattgagatttgctttcattcttaaaaaggaagtcagagaggctaagtttctgcagagacgtcctttaaaatgctccaggcatcacttcaggagacaagaatcttcttgactgtgggtctgattgtgcaataggaaaggcagtggcttgccgcagccccagcacccgcctctgtgactctgcagtcacaacttttctacaattggcagctgtttcccctgcattattcttttaggaatgcaaagggaataacaagaaaaaccaggcactagatttaaggaattatctgaagagttggaaaggagtttgaagatatttaaattctaaaatcagcttagtacagtgcctggttgagtaagtgagcaaataaatacttgttaaattaatgactggatattgctgagacctgagcagaactgaggtgtgactagtggaaacaaatgagccatcttcattgaactctgctgacttcagtgagtcccactatgtgttagcaccatgatgtgcacatgcagtgtgaactgcaaagacaaataaggcacactctctgctttcagaagcttagggtggtggaaagtgcagacattcattcattcactcattgtttcagaaacattcatgaagctcccagtctgtgccagtcactgagccagccatccccagaggagcgcagagcctagtgggtggcagacatatatgatatgagaaagaatgagagttacgaatatttagggatcaggcatagctgggagggccacttgagcaaaagtttagacgtggatgaagagtgacacatttgaggaagagcttgtggtccagggtagaggcaacacagagaaggtgatggatggagttgaggtgaaaaaagatttgtagtgggaggtcaagctgggaagttaggctgcagggaaatcgtggaaaactttgaatgccaggccaagagcataattctagaaccaaaagggagtgcctgtttatttttaaaataaggagaataatagtacatacgtgttttactttttatttttttaaagacaaggtctcactctgtttcctaggctgaagtacagaggtgcaatcatagctctgtagcctcgacctcctgggctcaagtaattttcccacctcagccttttgagtagctaggattacaggcacacgcgaccactcccagctaatttaaacatttttttttttggtagtgacagggtctcactgtgttgcccaggttggcctcaaactcctgggctcaagtgatcctcctgccttggtctctcaaagtgttgggtttacaggtatgagccactgtgcctgatcacatctgttttagaaaggtacctctgaccacagaatgagcaaaaataagaatagggaactagttaggaggatattgcaatgattgagttaacaggtcatgagaattccacctagcatggtggcagtacaaccagaaaggcagaggccagaggctcaagggagaaattcaaggctgaagggccatgtgtcattcagaggggtcagcacaagagaccttggcatcttcttcaccagagagctctcagaatggtcagggcacctctccaaaggaaacgagtgccaggaacaagcccaaagtcccacagcaaggcagagcatccgtggccctagatctattttttttataacagctttattggtatataatttatatgccatgaaattcattcctttaaggataaaattcagtggtttttagaatattcacagcaaccatcatcactctcatttcacattttaatcatcctaaaaagaaacctcatattattagcaatctctccccaggcccctccccacagcccctggcaaccacaaatctactttctgtctctatggcttcacctcttttggccgttccatacaaatagaatgacacatagcaaggaatatcactgctgaaaaaaaaatttttttaagaaaaataaaatcaaatcacacagtaaatgccatggccctaaatcttagtgggccaaactcctagaccccaacccagcgctcctcccttcagctgctcgcagcccattcacttctggggctgcagtgacctcactgccccaccttgtctctgccctgttttccagccttctcctgcaacgccggggagtttctggatatgaaggaccagtcatgtaagccatgcgctgagggccgctactccctcggcacaggcattcggtttgatgagtgggatgagctgccccatggctttgccagcctctcagccaacatggagctggatgacagtgctgctgagtccaccgggaactgtacttcgtgagtctgcacacacccccaccccacccccagcccactgggtaaggggctacagggcacactggacagcctcctccgctgcccctcaggctgggcagggaggatggagggaagaggaagccaggctgccagggtgaggcctgcagctgtgcccgcaagaccagtggatgtgactctgcctggcccactcttactggcctaaacttaccagtgatggacaggcatttgtgggaggtaaaaaacatgaggaaataagagagtggacaaggggggcaagggttaaatggcccagtctatttaaaacaaaacccaattggagctgggcacagtgactcacccctgtaatcccagcactttgagaggctaatgtgggaggattgcctgaggccaagagtttgagaccagcctgggaaacatagcgagacccctgtctctacaaaaagttaaaaaatttgccaggtgtggtggtgcatgtccgtagtcccagctactcgagaggctgaggcaagaggataacttgagcctaggagttcaaggttagactgagctatgaccgcaccactgtacccctggataacagagcaagaccctgtctcattgaaaaacaaaaaccggcagggcgcggtggctcacgcctgtaatcccagcactctgggaggccgaggcgggtggatcacttgaggtcaggagttcaagaccaacctggccatggtgaaaccccgtctctactaaaaatacaaaaaattagccaggcctggtggtgcatacctgtgatctcagcgactcgggaggctgaggcaggagaatcgcttgaactgggaagcggaagttgcagtgagctgagatcgcaccattgcactccagcctgggcaacaagagtgaaactccgtcttaaaaaaaaaaaaaaaagaaaaacaaaaacaaaaaccaaaaaaaccaaccggatttccaccacggaatttcagatcagccaatatactttctcagcttgactggaacacaatatgcaaagcttgggtatcttcccggcttgggtgctaacttcttcttcttcttcttttttttttttttgagacagagtctcactctgtcgcccaggctggagtgcagtggtgccatcttggctcgccacaagccccagctcccaggttcaagtgtttctcctccctcagcctcctgagtagctgggttacaggtgtgtgtgccacaatgcccggctaattttttttttttcttttttttgagatggagtctcgctctgtcacccaggctggaatgcagtggtgccctctccgctcactgcaagctctgcctcccgggttgacgccattctcctgcctcagcctcccgagtagctgggactgcaggcacccgccaccacgcccagctaattttttgtatttttagtagagatggggtttcaccgtgttagccaggatggtctcgatctcctgacctcgtgatccacctgcctcggcctcccaaagtgctgggattacagcgtgagccaccgcacccagctaatttttttgtatttttttagtagagatggggtttcaccatgttggccaggctggtctcaaactcctgacctcaggtgatccacctgcctcagcctcccaaagtgctgggattacaggcatgggccaccttggctgctaacttctgaaactgattctgcctagcctttgcccagtgctggctgaaatcttccaaatgctgtgagaccccaatgactagcaaattttcttggaaagctcagtccagggtgcttggagaactggatatctatttcagatatgtcttttgtaggccaggcactattctggatgctttacatatattattttctctaattctcacaagaaccttgtgaaataggcattactatttctattacagagacgaggaactggaagctcagcaaggttatgacctgctctttgttatccggtttacagccggcgagattgaaattcgaacccaagcttccactgctccataatgccacattcaaataacatttattatgggcaaggcaacactgggtcctagggagcgaaagtggggggatatgaggatgtgaaaggcagccatattgttccttattaaatatggacagtgaatacaggaggaaagcaagtgaaagtttcacttatacccaaacaatcaaatggataagaaggactcaagaattgtattacacttggatttctaaaaaccgggagcaatgtttcccattcctatacttaaatcttgtctaagccaagcagtggctatttaatctgtagtccaattttaatgttatgttattttagagttcaacttggtgtgtcagattcattagcatgacaatactggaggcagagataaagctagagagctttaaagctggaaggagcgggaatgtgtgggttaagacaaccaactcccatttgagtcctaactgagaatgtcattaggccctggacaaggtgcagacatggctcagtcaattcctacccatgtaaaggaaggatttcttctctctctggggactgcaccgagagtccagaaatcattatctctcagagaggcaggatgtgggtgggttaataacaacttgtgtttccaccgcacggactatttcagggcctgcatcttaaggcatcccacgacatcccggggagggagggagaggatatttctctgtcaatggagaggaaatggccatctggagagcttttgtggtttccccatcatccctcagaaaggcaataattgagctaatacctagagcgcaagtatttggctttcctattcagctgtgcagctacccaaatcctgcctgctctgcctcaagagactccaagctcatctcctgcttccattcccagcctcctccaggcctgtccactcagcagccagattcatctttcttttttcttttttttaagaaacaaggtctcactctgtcacccaggctggagtgcaatggcgcaatcacagctcactgcagcctcaacctccccgggctgaagccatcttcccacctcaacctcccgcgtagctgggactgcaggctcatgccaccacacctggctaacttcttatttttctagagacacggtttcacttatgttgcccaggttggactcaaactcctgggctcaaatgatccttccgcctcaacctcccaaagtactgggattacggatgtgagccactgcacccagcctcatctccttaaatccagtcacagtactttcccgctcaaaaccctagattcaatggctaccaattgctcttgggataaagtccactaccttcccacagcctgcagggccctgctgccctgccccctgccctctgcttgtttccccagcctctcccaagttccttctgtcttcacttgctgtgttccagccacactgaccatcacactccttcccctcctcagggcatttgaacatgtgactctctgtcccctcttctatgtctcctacttaaccctcaggtctctacctaaaaatcccttcctcaaagaaaccatccccgaccccacagactcctgttacactctctttatcatcctgcatttctccaatggcacttatcacagtcattgctatgtgattgtgtgattagttaagcttctgtctcctcaactagaaagagaatgcaagccccaagagggaaaggatcatacttgtcttgttcatcactgtgtctccagcatctaacatagtgtctggctcaaaatagacaaaataaataattggggacaaaacagaccagctgaacggagtctccatggcaggattctgagccttcagggatcctcccatgggtcctgggttgatgtcccagggctaaggtactggcctgagatcagaaactaggataagctaagggaacaggagtgacgtgggtgtaatagaaagaatgtcatatattagtggaaaagatcaagcagacgcccaaagactgtgacagtgaaacaagaatgagagagaaatgtaaacattaaaaatgaaaaacattatatgcagatcacaactggatgacctagggtaagtttcctaagcacttctgggcttcagtttcttcattctaaaaatgatgataaaaatagtactcttatagttgaggtaaggattgatgagatgatacttgtaaagaatttagagcgatgcctgacactagaaatcaatcaaaacatgttgttattattgaatatgaaatgtcttcaccgggggcaattctgacaaaaatcagaattatgatgcattttgcaaatgtaacccacttatggcatcttttaaattatttattaaacttcaagagttatttatagctgatgtcgtggagcatatcagcattaaaggttatccctttcaacaaggagaaatcaatgctgttaggttagctgggatattttggatgagctcatgttatatgttttcgttttgagaataacactgactgtcaaagagctgaaaataaccatgttattctgacaaacacagggggaaatctgtggactaatctgagattcctttaactggctattattattattattttgatatggagtctcgctttatcacccaggctggagtgcaatggcacaatctcggctcactgcaacctccgcctcccaagttcaagtgattctcctgcctcagcctcctgaggagctgggattacagccacgtgccacaacacccagctaatttttgcatttttagtagagatggggtttcaccatgttggtcaggctggtctcgatggtctcgaactcctcacctcaggtgatccacccgcctcagcctcccaaagtgctgcgattacaggcatgagccaccacgcccacccaactggccattattaagcaactggaaacctgggctggtctcaggcaaaacagtgcaatagcgtgagtgttttcgattacctgtttccacattcaactctttaaccctgtgactccccactatgtgccaggtccaggctggtgctgggaatactttagtgagtaaggtaaatttggtctcttccctcacataatattggcaacaattttgaggtctgacagtttcaaatttggagaggatgtggagcaacaggaacagtgtagcagtagctggtaaatgggaggctcacatacagttctcctcccaggctttctactcagacatgtgcctaaggagacaggaacacagcagaatgtgcacatgaaactgcaaacaatccaaatgtccatcaacgagtaatgcacaaatatatatggcagagccgtacaaaggaatgttatgcagtagtaaagacgaagccaaaaaagctggatgtgtgaatatggatgaatctcacagttagtatattgaagtcccttccttcccaaagtgagtttcagagcccataaatataataccatttatgtgaagcttgaaaacatgcgaagcactaccatacagtatgttgtttagagatacatacatgtagagaaccgcatgcgcatgttaaacaccagattcaggaaattagtcacttggcagtggggaaggcagtgtgttccaggaaaagggatgaggttagtggagggtacgcagaggcttctgctgtgttgaacttcttaagcagggtgatgggtcggggagtgttcattacaccattgtataggtcttacatatttcataatatactaaaaatatataaaatatcatgggattatggctatgagaaggagagcaaagagagctaagggcacccatagcagaagcagatagaatcaaggaagactttttagattaagtgacatttaagacacagtaggagttaaactgagagagagaggaggaagttcattccaggaagagggaagaggatgtcaggaggcccagaggtaagagaaagcttggcagaggaattgaaagaaatgtcatagagttgaagtatatagagtgcatcaggaatttgtaccctatcctaagggccacagggagtcagtcccaggggttttaatttgaagcaagggagtgccatggtcagacgtctattctggaggatctgtccgctgggctgcagcatgcagagggcttggaggatgtgggactggcttcagggagacaagtttgggggctggttcatagatggtgtggtggtgagtgtagggagagcccgtggacagggtggatagagtgaacacgtatttaggagataaaacagacatgaccaggttggctgtctccagggttctccggccctccttgtttccataaaaaccatttacatgcagcatcttatagtagacatttctggaaaaacaggtagactagactgggtggatgtctgagttctgaagaatatctgtgtctactgagttatttgacagctttagagtttggcagacctgatttcagccctgccactcgctgcttcgtaatactgggcttggcactctccaagccccagtttcatcatctcttaaacagaaaaaacatttcctcttattgatgaaaataaatcatgaatataaagcacgtagttcaattcctggaaggtagtaagcaaccaataaatgttacccctccctgactaggcgcagtggctcatgcctgtaatcccagccctttttgaggccgaggtgggtggatcacttgaggtcaggagttcgagaccaggctggccaacatggtgaaaacctgtctctactaaaaaaaaatacagaaattagctgggtgtggtggtgcatgcctgtaatcctagctactcgggaggctgagacaggagaattgcttgaacccgggaggcagaggttgtggtgagccgaggccacgccactgcactccagcctgggagacagagcgagactctgcctcaaaaaaaaaaagatgttagccctccccaacttcacctgccacccgtatcccaggtagctctgcacaatgtggaggcatgcctgcttgttttcctcacctgtctgccttcctcttcttagctgtactccaggtccttgacctacctgagagcttcttttgtctttcttcactgagcattttcaggtccaagtttcagtttgtgaatcacaagcctgaaaattcccaaagacccagcagaacatgagacctgcacatggcacaaagcctggtgggctgtgctcctgcctgtgaacctggttcctgttccttcacaggtccaagtgggttccccggggcgactacatcgcctccaacacggacgaatgcacagccacactgatgtacgccgtcaacctgaagcaatctggcaccgttaacttcgaatactactatccagactccagcatcatctttgagtttttcgtaagcccctggccaaggtggagggtgggagctaaaaagcctctctggggttcagatccgtttgaggaatccatcatgagtgtagccctgcttgggggaatcactgttgttttctctctggagagagctgtgggcaaaatgagctgaggcccaggaggcaagaagaaaaggcaaaagtgaaaggactattgggggaagaattgtctggcagatttctaagtgttttatccagctcagacatgaaaacagcacatctgagttacaagttatttctttggtgtcaacgctcattttgtgtgtgtgactaactcctgccctactttgaggctcatgtgttttgagctcaatccctaaaggaaattggcaactcttcccatataaagaagggccctctggagggctggtgcaatgtggggaaaggtatccatttccttagaaagctgagactctggtcccaaactctttttatgtcaggttcagaatgaccagtgccagcccaatgcagatgactccaggtggatgaagaccacagagaaaggatgggaattccacagtgtgagtatcacaccagccttctcccagagatcccagaaaagggacccagggcctttcctcagagagtgcttcctcccagtctgagcctccaccccaatgtccctggagggcaggaatgtgatatgatgaagatgctgtagttactgtcctctagcattgacagaatatgggtgtgagctgacttgtagcttctatggcttgactccaaagaccagcagctttccagctttaagactgggtcttctgccgggcatggtggctcatgcctgtaatcccagcactttgggaggtcgaggcaggtggatcacctgaggtcaggagttcgagaccagcctgaccaacatggagaaaccccatctctactaaaaatacaaaaaaattagccaggtatggtggcccatgcttgtaatcccagctactcgggaggctgaggcaggagactcgcttgaacccaggaggcggaggttgtggtgagctgagatcgagccattgcactccagcctgggcaacaaaagcgaaactctgtctcaaaaaaaaaaaaaaaaaaaaaaagactgggtattctggggaggggggctgtccccctgcaaaaccacagaagaatgagggagtgccagtcaccctgttgtcaggaccctcaggtctctttactggtctcaccataagagatgctcatggtatatatgatccagggagtggtgggagggttgtaagaggaggcttagaaagagagaggagctgtgctaagttgggaagaaggacagagctgaggaagaggaggaagagggtcagaagaagcattaccatgcagttagtaagagaagtcatcccaacaagaggctataccaacagattagcgagatttttctctgtgatgaatgaatgctcctgtttgtggtttttaggtggagctaaatcgaggcaataatgtcctctattggagaaccacagccttctcagtatggaccaaagtacccaagcctgtgctggtgagaaacattgccataacaggtactgagagcagggttactgacttcctgggctgttgactttgcagtctcctggggactcagtctccaggctgaatccttgcttttctgtgctcttcctcctccctaggggtggcctacacttcagaatgcttcccctgcaaacctggcacgtatgcagacaagcagggctcctctttctgcaaactttgcccagccaactcttattcaaataaaggagaaacttcttgccaccagtgtgaccctgacaaatactcaggtgatgtttctgagggtgggaagagtttggggatagagagtaccaccaaaacacacaaggagataccagggaatagagccatccttctggccaagctgaggatggtaattcttaaacccttcctttctggatcctggaatacccttgccaatccatatatccattaatcactttgtcatttttttttttttttgagatagggtctcactttatcacccaggctgaagtgccgtggtgcgatcatagctcactgcagcctcaaactccctgtcccaagcaatcctcccgcctcagcctcctgagtagctaagactaccagcgtgccccaccacacccagctaattttttatttttatttttatagagacaggggtcttgctagttgcccaggctggtcttgaactcctgggctcaagtgatcctcctgcctcagcctctcaagctgtgagcctataatctcagcactttgggaggtcaaaccgggaagatcaattgggcctaggaggttgaagcttcagtgagccatgatcacaccactgcactacagcctgggtgacagagtaagaccctgtctctaaaaaaaaaaaaaaaaaaaaaaaaaaaaaaaaaaatcattcaataaatattgagcctctcctatctaccaggccctattctatgtgcttggaatacgtcagtgaacaaaacagacaaaggtccctgtttttatggggtttacattcgggggtggggggaagagagacaataaacaaaaagaaatagatgatacatatataataaattatatagtatgtgagatggtaaaaagtgccatggtgtcatggcaaaaagaaaaagcagctcagagctagagggattagggaagctaaggaaagggttgcaatccttttttttttgagacggagtctttctctgtcgcccaggctggagtgcagtggcgcgatctcagctcactgcaaactctgcctcccaggttcatgccattcttctgcctcaggctcctgagtagttgggactacaggcgcccgccactgcgcccggctaattttttgtatttttagtagagacagggtttcactgtattagccagggtggtctcgatctcctgacctcgtgatccgcccgcctcagcctcccaaagtgctgggattataggcatgagccaccgcgcccggcctgggttgcaatctttttgttgctgttgtagaaacacggtctcactgtgttgcccaggctggtctcgaactcctgacctcaaagtgatcctcctgcctcagccttccaaagtgctgggattacagacatgagacactgtgcccagtccagtcattttttttaagtggtgaatttttatttttatttttatttttttttgagacggagtttcactcttgttgcccaagctggagtgctcgaatgcagtggcgtgatctcggctcaccacaacctctgcctcccgggttcaagcaattttcctgcctcggcctcccaagtagctgggattacaggcgtgcaccaccatgcccagctaattttgtatttttagtagcgacagggtttcattatgttggccaggctggtctcgaactcccaacctcaggtgatctgcccacctcggcctcccaaagtgctgggttacaggtgtgagccaccacacccagtcagtggtgaaattttaaatgaaacattatataagattataatataggccaggggtggtggctcgcgcctgtaatcccagcactttgggaggccgaggcaggcagatcacttgaggtcaggagttcaagaccaggctggccaacatggcaaaaccacgtctctactaaaaatacaaaaattagcccggcgtgggggcgtgtgcctgtaatcccagctactcaggaggctgaggctggagaatcacttgaacccggaaggtggaggttgcagtgagcagagatcgtgccactgcactccagcctgggtgatagagcgagactcagtctcaaaaaaaaaaaaaaaaaaaaaaaaagattataacataaacagtagatactgtagatttaaaatgtataaatttatacattttaacgtataacaattattatcaaagttaatttcatgagcctatattgatgaacaagaagattttgataacaaggtctaaagatgcaaatgacaatcttttatcaacctgagagcattcattgaagtcaaatcaggcattctgggaaatctaggtttccttgtaacacaatttgcaaaccactgctctgagggaaagtaaggggacagcaggaagcagcctgtttttattgtttgaggatagcttcctaaagcattccaatttgagaaataggacgtggttatttgagggagttccagggggtatcgaggctctgatgtgggatgggcagtgccagcagatggctttctgctcagacagtccagacattggtatgagggccaacctccaagacaggttctgaaacaaacaagaagggagagagaagcagtcccatcttttccccagaaacactcacaactattctacttttccttttttacacagtttatatgtaaacccagcacaaggccctctctcaaacagacctacatatccctacaaagacatgccaaacttcacacaggtgtgaaagtatgtgtttgctcagccaagaccagccactgaccttgtgaattgcttgtttctacactattcctaaaacaaaagtcatatttacctacacagatcttgccaaatgagtgcagttttctttttttttctttttttttttttttttaattgatcattcttgggtgtttctcgcagagggggatttggcagggtcacaggacaatagtggagggaaggtcagcagataaacaaatgaacaaaggtctctggttttcctaggcagaggaccctgcggccttccgcagtgtttgtgtccctggctacttgagattagggagtggtgatgactcttaaggagcatgctgccttcaagcatctgtttaacaaagcacatcttgcaccgcccttaatccattcaaccctgagtggatacagcacatgtttcagagagcacagggttgggggtaaggtcacagatctacaggatcccaaggcagaagaatttttcttagtacagaacaaaatgaaaagtctcccatgtctacctctttctacacagacatggcaaccatccgatttctcaatcttttccccacctttcccccctttctattccacaaaaccgccattgtcatcatggcccgttctcaatgagctgttgggtacacctcccagacagggtggtggccgggcagaggggctcctcacttcccagtaggggcggccgggcagaggcgcccctcacctcctggacggggcggctggccgggcggggggctgacccccccacctccctcccggacggggcggctgccgggcagagacgctcctcacttcccagacggggtggctgctgggcggaggggctcctcacttctcagaccgggcggctgccgggcggaggggctcctcacttctcagacggggcggccgggcagagacgctcctcacatcctggacggggcggcagggcagaggtgctccccacatctcagacgatgggtggccgggcagagacgctcctcacttcccagatgggatggcggccgggaagaggcgctcctcacttcccagacggggtggcggccgggcagaggctgcaatctcggcactttgggaggccaaggcaggctgctgggaggtggaggttgtagcgagccgagatcacgccactatgagtgcagttttcaactaaaacagaaatctttagatcttgggggaagtttttatctgtaagtctagattcctgtttttccacttgcattttttattcctcttccccactctgcttctatcaacagcaacctttgttagcctaaatctctggctccctttatggtccagcagttgggcagggtttgaatggcaaggtggttctagaaaaacttctcatagaagtgttttgatcaactctgtgtaagctgatttttatccagagtgctgttataaaagcattaggttgggagtctgaattcttggaatctattttccttctgccactgatttctcaatgtgccccattgactgagaagtgagttttttcttttttctttctttttttttttttttgagatggagtttccctcttgttgcccaggctggagtgcaatggcgcaatcttggctcactgcaatctctgcctccccagttcaagtgattctcctgcctcagcctcccgagtaactaggattacaggtgcctgccactatgcttgcctaaatttttgtatttttagtagagacggggtttcaccatctcggccagcctggtcttgaactcctgacctcagttgatccacccgccttggcctcccaaagtgttgggattacaggcgtgagccactgcacctggccagtgagtttttactatgaggaacatggtcaacttgttgacaacctcaccggcttggggtacaaagagagtcatatttctttgagacttgactcttccagaatacagggtcagtgagagactgggaaattgcagggagactctgatgatagcctatgatagactgtatgcagggagtgacagaaggtccatgcatttacaaatatattctgagtacctgccagttgccaaggactagcttggtgctagggttagagctggtgcctgacctccagcttatgttgaaaaggaaatgtggttatataaacacctaagtgcagtaactctccatggtgttgggataggagagctgggtgtagaatgcagtggaggtgggccgggtgtggcggctcacgcctgtaatcccagcactttgggaggccgaggtgggtggatcacctgaggtcaggagttcaagaccagcctggccaatatggtaaaaccccaactctactagaaatacaaaaattagctgggtgtggtggcgcacgcctgtaatcccagctacttgggaggctgaggcagaagaatcacttgaacctgggaggtggaggctgcagtgaaccaagatcatgccactgcattccaatctgggtgacagaataatactgtctcaaaaaaaaaaaaagaatgtagtggaggcaaaaaaggaaaatggttagtcccctctagaaaagaaggaaaagtttcactcgctaagatctggaaagatgaaaggttaattagtgatttggtgggggcaggatgtttgggatagaagtgtgagcaaagggccaggcgcagtggctcacacctgtaatcctaccactttgggaggccagggcaggtggattgactgagctcaggagtttgagaccagcctgggcaacatggtgaaaccccatctctactaaaaattcaaaaaattggccgggcatggtggcgggcgcctttagtcccagctactcgggaggctgaggcaggagaattgcttgaacccgggaggcggaggttgcaggttgcagtgagccgagatcatgccactgcactccagcctgggtgacagagtgagactctgtctccaaaaaaaaaaaaaaaaaaaagaagtgtgagcaaaggccagaaagctcaggaaactgcaaataattcagcttggctggagattaggtggcgagaagttgcatctaaggctgagaagcaggccggaaacagattatggagcagtccttctgtgctattgtaggggcaaaaaattgggatttgatcctatcagcagtggaggtcattaaagaattttaagaggccaggcacggccatgcctgtaatcccagcactttgggaggctgaggcaggtggatcacctgaggtcaggagttggagaccagcctgaccaacctggtgaaaccccgtctctactagaaatacaaaaattagctgggtgtggtggcacacgcctgtaatcccagcaacttgggaggctgaggcaagagaattgcttgaacctaggaggcagaggttgcagtgagccgagatcacaccattgcactctagcctgggtgacaagagggaaactccatctcaaaaaaaaagaattttaaatgaaggatttcagccagtgcttttgaaagaccactctggctgccatgcagaggagggagggaatgctggaggcagaggctgtggtagggagatgttgcagctggcatcattgctgatgtccaggacctaaactaaggtggaattaatgtgggtggagattggagaactcacaggagcattgtgaaggacaaaagcctgactaaaagcatctttctcactggtccctaaaatttgatcattaggtttaatttctttgtgttatgtttcatattagtgatccatttcctaaacagaatagcatgaagttaaagagcatggactccagaactaaattactagggctcaaatccctgctccaccaattagtagcagtgccaccttgggcaaattacttatctgtgcctccgtttctttgtctataaaatgggaaggacagctgggcacagtggctattgcttgtagtctcagctactggggaggctgacgcaggaggatcgttcaagcccaggagttagaagctgagtgagccatgattgctccattgcactccggcctgggcatcagaacaggaccccatctctttaaaaaaaaaaatgggaatgacaataattatatctgcctcatagtgttattgtgaggattggttaatacaggtaaaggatttagaaaggggcctggcatatagtaagcagtaattttattaattcatttaccttaagccctgtcccaacactccttttttaatatgaaaatactcaggccagcactatggctcacacctgtaatcctaatactttgggaggccgaggcaggaggagtgcttgaggccgggagtttgagaccagtctgggtaatagaacaagactcctgtctctacaaaaataaaaaaattagccaggtgtggtggcatgcacctgtagtcccagctactcagaaggctgaggtgggaggatcacctgagcctgggaggtagaggctgtactgagctgattgtgccactgaactccagcctgggtgacagagtgaggccctgtctctaaaaaaaagaaaagaaaagaaaatactcctggtacaggtaacactcataagtcacgtgtatagtactctccaattgacaaaacatgatctcatttattacctatagcatagtgagggagttatttctgcatttaccgaggaagaaagagaagctcagcgacactgaggagcttcacaaaagcatgagctgctgtctgacccgggcctgtgtccattcagtactgaaaccctcaggagaaatgttttactttgataaaacagatcccagtgagaacattgtactcctggaggtggggggatattgaaaggaggaggcaggtgcagaaagaggagttggagcccctgagataaactttatcttcttacagttttgcccagggccaatcctacttaagtcacttttcactccctcaaccaaacacagaggcccatcttccaaacttgactagcatccaacttaaacactttgatgaaacccaagctgggaaaggaggttggtctcagcattttggttaatcatttattaaaaccaccttaacagggatcagtgtgtaaacagctgagccatttttgctaaaacccagagctaggatgtcagattgagcaaatatttgacaagcagagaaaggtcttggtgtagaatgcattttctaacacataacttgtactttgctagacctaagaattggcaccttcccacgttttcagcctctctccccacatttttcctggccaagtcagtcaaaagcaggagtccatgggtccctctgtgctgaattgggcctcctgcttggtaaccaagtaaatgagctgagaagaccccaactgtttctcagccagtagttcccacctgtccagcctaataagacagagacagaagaggtatggagatgtgcagttgagagaactttccagctcaggccaacaagactgcaattaggagattatctgatctacgaacccatgtggtgcctggagaaaaagaaggaatcagttgagaaataagcccttaactgaaagggaggtaaagagacctttaatccttattcactctcctgtgactactcccaaataaaaataattcccggctgggcatggtggctcacacccataatcctagcactttgggacgctaaggcaggcagatcacgaggtcaggagtttgaaaccaggctgaccaacatggtgaaatcccatctctactaaaaatacaaaaattagctggatgtggtggtgcacacctgtaatcccagctactcaggaggctgaggcaggagaatcacttgaacccgagaggcggaggttgcagtgagctgaggtggcaccactgcactccaacctgggcaacagagcgagactctgtctcaaaaaataataataataataataataataataattcccaaacatgcaggtaataatagttactgctatctagtgagtatctacttacaatgtgccaggtaggtactggctccagcaaggtatatattattattcctgttctacagatgagaaggctgaggctcagagaggttaagtaacttgcctaaagtgacacagctgctaaatgatgaagcaggatccaaacccatatccgtctagcttaaaatctcattccaggccgggagcggtggctcacacctgtaatcccagcactttgggaggccaaggcaggcggatcacgaggtcagcagatcgagaccatcctggctaacacggtgaaaccctgtctctactaaaaatacaaaaaattagccaggcatggtggcgggcgcctgtagtcccagctacttggaaggctgaggcaggagaatggcgtgaacccgggaggcggagcttgcagtgagccgagatcgtgccactgcactccagcctgggcaacagagcaagactccatctcaaaaaaaaaaaaaaaaaaaatctcattccactacaccatactgcttgccaggtaatataaagagagagaagttcttaccattattcagtgcttatctgcaggtgacacagcagtcatattcgaagtagtggtggcagtagtaacagtattgtaatgtgcacctcataaagcagttgtttttattctggaggaagtaaattccctagaaaactttcaaaaagtttttatttgtatgaattacgcatatttttctaggtagagagaaacatctctttttttcaaattttcaaaagagtttttaaaatcaaaaaaagttaaacccactgctttaaagagagagtcaagcacaatggctcatgcctgtaatcccagcactttgggtgggtggctgaggtgggaggattgcctgaagccaggagctcaagaccagcttgggcaacatagcgagactctgtctctaccaaaaaaaaaaaaaaaaaaaacaaaaaaaagagagagagagagaaaagaaaacaaaccctatgatgaaataatgaaaaaaataaaattaaaaaatgaattcatagaagtagttctcactatccagaggttcacagggttaaagcagagctaacattgaaaggaggagaacatgcagagagcagaagaaaactgatagttcacgtttttcttctttctttcttttccttccttccttccttccttccttccttccttccttccttccttccttccttccttccatccttccctccttccttccttccttcctaacagagtctctctccattgcccaggctagaatgcaatggcatgatcatggctctctgcagcctcaacctcctggactcaagtgattctcctgcctcaacatcaagtagctgggactataggcctgcaccaccacgcccggctaatttttgtattttttgtagagacagggtttgctatgttgcccaggctggtcttgaactcctgggctcaagagatcctaaagtgctgggattacaggcatgaaccaccatgcccagcagttaacatttttcattaggtataaatcaagagttaaagatagtgttgggctggtgcgggaggcgggaggatcgcttgagcccaggagttccaggctgcagtgagttaagattgtaccactgcagtccagcctcagcaacagaacaagactctgtctctaaaaaataacaataataaaataataataaagaggccgggcacggtggctcacccctgtaattccagcgctttgggaggccgaggagggcagatcacctgaagtcaggagttcgagaccagcctgaccaacatggagaaactccgtctctactaaaaatacaaaattagccaggcatggtgactcatgcctgtaattccagctactcaagaagctgaggcaggagaatcacttgaacctgggaggcggaggttgcagtgagccaagatcgtgccactgcactccagcctgggcaacaagagtgaaactccatctcaataataataataataaagatagtgttgggatgcttgggttgaggcaagtgggaagaaccttatgtgttaggtggagtccaaggaaattacaaacctggtttgtgtagaatgattgcatgaagaaaaggaaatttccaaggtggaaggccttcattctaggcatatattagaacattcatagaaaggcttggaatgagtatgaaagcaaaatcatgttttacttcaacacttcaggagtagaaaaaccacacccagagtcaagacactaaggcacctggaagatggtgaactctctgaacctccccaggtttcagggaacttaggttggcagtggttaacctgcaagaagctgtttccgtctaccctccttgctggtcctttggccaggccacttctccctcccttgccccatggggcgggggacgggaagcggcaaacagtggtttctcatcagcacctggaacaggtgcaaagggaagcttgagcagggttggggaactggaaatgacactattgagacaaggggaagggtgagtgtgcaggattttctacttccggcaatatttgtgtggcaatgcacccagggacttgggagtcacagggccatgaagaggccaggagctcagctttcttatgtaactccaaatatttcttcttgctttggcaatttagagaaaggatcttcttcctgtaacgtgcgcccagcttgcacagacaaagattatttctacacacacacggcctgcgatgccaacggagaggtgggtagtacagtcttggagccccttagccccagatggactgtctcccactccctgaggtttgccaccatttggaacttcagcagtcaatgacattggcactagttaaaaccccacagacctttgaggtgaccctagggctaggtggggtggggggcaaaacgagacctcttcattcattttccggtcagaaactgtttttgcagcgtttgtttcactgtttatgcacatatgttctgtttcaaaaacccacttcattctctcttgcttggtttcttctatttgccgagccactccggcagagcctgcctgtccgtacacaatgtcctcccggggctcttcaggctcaccccctcggcactgttttgtgggctggcacggggaatggattcctgcctatggtctgacttgttccgtttctgctgcttctctttcctccaggctttctgcttcagaaaagaactttccctcctagtctacactgtcactgagtcaacaagcattttttgaggctgactgatatgtcaggcctggcactataggctggggagtcagagacgactgaaacaagctcctgcccccagggagctcacagtcctgtatgagaggctggagagaggagaaaaacgggcccagtcaaggcaaccagagggatgtgcagggaactgggggagcccagaagagaagcgaccaggacttggggtgggggcagcagagaaagcctctcagaggaggccatttgttcaacagtcaacaaatatttatcgaggagcgactctgtgccaggcacggtgctaggtgctaggcatgcatcacttaacaaaactgagggaacatctagcccttatggagcttaactcttgttggggagggagtggagagagagataatagacaacaaatgggtatataatatagcaaatggtagtaagtggtaggaaggaaaaaaaaaaaccaggattaggagagagagaatgaaggagggtggtgccactattttagaagggtagggatgtcctctcaggaggtgacatttgagcagagacctgaaggagatgagggaggagccgtggagctttccaggcagcagacacagcaggagaggaggcggcagctgggccaggtgggtggagaaacagtgtaagtgagcagggaagggcttgaggtgcacggagaaggatctggctgagctgtctgtatccctaagctagagattctcaagaggatagaactaggagttgggcattctgcactcagcactaagcatgatgcttggctcttagggagcataaacatttgctggctgggcggctgactgaattctccctttcctaactaagcatgggttaaagtctggtccttaacaatgaatattttgcacagtcatctcttaccaacaccacctcccccacgtatttggggcatcatccccttctccagcagccaagagagaatggctgtgtcttgtcagttgcaccttagactcagttctgtggtgtctggtattctgtatgaccttgtgaacatttattttcattttcttggtctcagccaactcactaataaaaggcagacaattaatcctgctgctcttctccctcctgttcataacatgtgactgaatgtggctgtctttcctcccttctgccccattctcttccctccctgggctcacgccaaggccttctgggtcagtaccgtgcttgctgcctgaaagcccgggtgtctgccttggcctgaccactgccggggcctttagatgctgggtcagaccaaagcctgtgttcccgccttgcagcacagccaaggcccagctcagaggaggagcactgaagcgtgtgctttcaggagtgcgcatgaacatgcattccccagctgttccttgcagacttctgctttgtgcctcattcccgcactggttctgctcagtctggtgattgagtttgtcttctgaacagtattttaaaatcaagggacacacctcgagctggctcctatgattacatttctgaccttggctgtgcctcagttgtttctcagggaccaggatggcccatccattggggtcagtgaatgtgctgctccaagagctggcccgagacagtttgccagctcctaggactctcctctccctgagactcacaggaggcaggtgaggttcaagcctggggctctggctgtcgcagccctccgcagggaagagggccgagctgagcaggggaaggaggagcccagggctccccatcagttaaggcagtctgtgtccctccttaaggacttgtttcttatcttgaaaaatatggacagaggccttattcatccttcttttcatatgtatggtatctgcacagatcatgttcatcaacccctcagttcaacctataagggcacgtttttgtctgtgactcgatctgagggccacatgggaagaatggagctgcccaccttcacccctgactcagccggggtctcctgcgggtcatctccacttctgtacccaatgcaggggccatgtttcattcatctctgagacaccaggtctggcacatagatgcattaggatttacccaataaataaaagagcaaagaatgtaccactcaaaaaataagtggggacatctcagccaccccctcagtccccgggggacatctgagccacctccacccttgtgcctttctgtgttctgggattttcaccagctgcttttcctgtgaccttggtagcaataagattctacagtggaatcggagctttctctaagacaactggtcccacattctctgtcataaagtcttcattagagctattccttgtcacccaggcaacattcatttggcagatagtgattgaacacaaccatgactcaggcactgggctaggtgcttgggatacatccgtgagccacacaaagttccccaccccagaggagctcttacctggcccagaatctggatctctgcccccagcccctatcctcaaggtagagtcccaaagatgtcctaaatctcacacaggctgagttgtgcttaatccatttctgcagacacaactcatgtacaaatgggccaagccgaaaatctgtagcgaggaccttgagggggcagtgaagctgcctgcctctggtgtgaagacccactgcccaccctgcaacccaggcttcttcaaaaccaacaacagcacctgccagccctgcccatatggttcctactccaatggctcaggtaacctcctcaccaccccactctctgcagcacatcgactgtgtgggtgggctgtgtgggcactaacagtggccagctgaatgcagactctgcccttccaagggaggcagtaaggaataaggaccaggccacctttgaggactaaattcaggagaagagaggtcagggctggcctcgtctgcaggtcagagtcatacttgaggctgccttccttcctccttgctccaactgcaaatgtgactcaggactgaaggtgcccaatcctcaaagcagggcttccagcatatggcagagatgctgactaggcttacagggctgggatgaccaaccccacacaaccaaaacctataagccatgctgccttggggggatttgagtacctgttaaaatgaaagcatttaatgataatatgacaataatatgaactatatgtatcagactagaaggtacatttaagttttgaaatggaaattggggtgggcaaataggatggttggcatattggaatgaaggctcagtgtttacatcttgagttaaatacattgtcagaatgtttttgagtcaacttgatacaacttcctgcagcagtactcagcagccaggcttctgggctgcccgctactgttgcaacttgtctgtgtggcagcagctccagtcagagtgactgcagccttcccactgaatgcatggatcttgtttgtggttccccagactgtacccgctgccctgcagggactgaacctgctgtgggatttgaatacaaatggtggaacacgctgcccacaaacatggaaacgaccgttctcagtgggatcaacttcgagtacaagggcatgacaggtaattgcctctccctgtgccatgagctgtcagctccctgcacaccctcagttcttccaacttcacatttcttcataatagtgatgtctgagaaaaataagctaaccatgtcatgcattcccttgaaagttccactcctcatggacatatgttctgccaagacagctttagaggaaggaacagagctagaaacatgagcgtgcacttcaaaggtcttgctctgagagcttcagggtttttgaccaaagtggcaggataagtaacacggttcatgttcagtggtggttctgggcgcctcaaaagatggtgtcaaacctcccttccagagtgtcatctgggtgcacatttgccttgcacccaagagcacaaggcattaactctcctctttccttttcaggctgggaggtggctggtgatcacatttacacagctgctggagcctcagacaatgacttcatgattctcactctggttgtgccaggatttaggtgaggaatccaaagcccaggggagtccaggccagcttggccatatccgaatcccacgtattttggaatattgtagaggagagggcttccggggttgtgtttcatttcatttcaaatgtcagttgagaacagagggtacagtttgaccgaggtaacccaatgctatcacgtttttcaagttgctgcccatgttgatttaccgactgctctctctcccgtatagcttctcccagccattagtcacgtgctattcaaattcttcctcctcacagcatcacttaagattagaaaaaaaataaaaataaaaaataatggggtcagaaatgcccatagacagttcatctttatttggggcaagaagattgggaaggattattcttactgtatttgtccccatatcccaggaagacctagggcaacacgaaatttgtttcccactaaacaaacaaacaaacacgcacacacacacacacacctcctggcagtgtggtgtggtggaaggaacaccagactggaagacagggcacttgtgctttgccgcttactggccgtgcgaccttaggaaaagtcacttcacctgttcaggcttcgggcccctcatccataaaaacagtgtgtgatttaagactaactgaggttcagatggcttttccagcccgctggttaacacagctgcatagagataagctgagaactggaggtcctcagaattcaggcaaatggctaaagccaaaaggaaagccgtgaatgaatttccaaggccaaagtgaactcttctgcccatatgtgctctaaagataagaagcaggcactgaatatgcttccctagtgccagtctgacaccttcatttccttcttcgaggtccctgcttcccatccctgggatgttgctcagtttgccttcccttaacacacattactcagagctagccagatgaatgaagcctgtgtttgcaaggtgagcaaactttttaggctttttttggaataacattcaaaaagtactttccaatttgcaaatctgatcgtcatagtaaagtgttgcctcatcccccatccccactactaccccagcccgcttgggcatggctctctctttcccaaaagtaggaccaaacggaggactttgctggatcacaaattctgctcctttaaccccggcaaagctccccagtgctggagagacagctgctgagtaaatgtcaacaatttacagtcttatgatagacgtgcttctcaaacataaatgtgcacacgaatcgcctgggaatcgtattaacatgcagattctgattcactgggcctgggaggagcctgaggttctgcagttctaataaactctgggagatggccatgttgctggtctgtggaccatattctgctagtgaggtgatacagcattttataaaggaccgccacatctgtcatgccttcaggtctccccgcgatgatggggggtaggtaagaaagagatttcatcacctccattttacagataaggaaaccgtggtttggctaggtcaaggtcacatagctaggagggcagaattggatttagtccacacgctttccatcatactcagaacttaaccctgtcccccagcagacgctctgctgttgtctgggctcttcaataagcactgcctggcctttagaactgacttttaatttctgcccctacagacctccgcagtcggtgatggcagacacagagaataaagaggtggccagaatcacatttgtctttgagaccctctgttctgtgaactgtgagctctacttcatggtggtacgttttcctttctttgcccgctagagggcctccaggggagggttagccccatctgccccattggtgtgtccacgtgactgacacccccccttgtagtgattccacagaggaaaggcccagactgaccagcagggacttcacagtttaacaagggtctcaccaaccgtgatggcacctgggatggcagccacatgggcacccacttcccctctggccatcgcacccgcttcacttgtctgtcctgggttcagggtgtgaattctaggaccaacactcctgtggagacgtggaaaggttccaaaggcaaacagtcctatacctacatcattgaggagaacactaccacgagcttcacctgggccttccagaggaccacttttcatgaggcagtaagttcctccccttcctcagacccccaggagagaccctctgaacccaggaggactcctagcattagcttaagtatgagtgtgaagttcagaatctgagggttagaaggatctcagggggtcaagcagaaaactgcctaacccagccctctgaggaccacctagtcttgtccagctgacttcctggaaagatgacaccataagaaataagttggccctccttgtagtccctgccctgatacatgtgttaccagacttgttgttgtttttaataataacaactctggttttagtttcttaactcaaaggaatacaggctcattgcagaagacacagaaaataaaaataaacaaaaataagaaataaaatcagccataatcctactactcagagataaaccagttaacatctggacaatctcctatacactgtttgtttctgcacaagtacatttttttctcttttataaggaaaagacttgcttttttcataaaactgtatatattatattttccccatggtacttaacatttttatatgtcctataaatggttcagtctcattttaaaatgacatcaaatgcacacgaagagctactggtaagtgagtaaaaagagtcagatgcttctcagattcttcttaagtatcacaggatagaagattaagtaccttgctctttctagaggcctcaattgttgctgctgtctcaggcctctcccctctcccctcttgtttccttgtctccagagcaggaagtacaccaatgacgttgccaagatctactccatcaatgtcaccaatgttatgaatggtgtggcctcctactgccgtccctgtgccctagaagcctctgatgtgggctcctcctgcacctcttgtcctgctggttactatattgaccgagattcaggaacctgccactcctgccccactaacacaattctgaaagcccaccagccttatggtgtccaggcctgtgtgccctgtggtccagggaccaagaacaacaaggtacctgtagtctggcatgcatcctaaacctgaccctctgcttggatgacctcagaagatgctgggtcctgggtagggttcttgagaggctgatacccgagtgctccccctagcatactcctaggttggagtcctggaggacacccatccaggctgtgactgtggagggttagcagggcttaatttccagggtccaggactcagtcactgacaagtctcctctttagttggcaggtaagagaggttggtgactgtctggtccagagggttatttggcatctgtgcagagacctaaagggaaggaacagtggggtgaggcctgtggcttatattcaaaaatgttcaatccagcctgttattatggaaatctgccccttctttggaaagatagaaacccaaccattgctgggacatatgataactggcattgctgtcttctatcccagtggcttctcagctttacaagtataaggattcctttcctaagtggaaaaaagctgggtgcagtggctcacatctgtaatcccaacactttagggggctgaggtgggaagatcacttgagccccggggttcaaggttgtaatgagccgtgattgtgccactgcactccagcctgggtgacagagcaagaccctgtctctaattaaaaaaataaataaaaataaaggcacattaaaaaactaataaataaataaagtggataagcagtgttgttgcccccatgtactttctgcatctgagaagtacttatgactaaaagcttttagatattaatcgatgcttttaaatgaatttgcattttactgatcacaactacatgcacatacatctgtaaagcactatcaatatgtactctgcaaacgttgcctagttcatctgtgcaataagtgcagcgattctacagactcctggcaacctctttcgggtaccctggacttttgccacaaccttccttccctggagctccctctgctgctgtgggagggaatgacagttgtgtgcggctaccgctgaatggtgaccctaaaacagagcaatgaatgggtttatgggaagaaaagcccctttcggagttcagtttcctacagagaacctgagaaacaggaagcagagttcagtgagttttgcactgtgagggggtgaggagggagcaagaaaagtttctcttctcccatctcagatacccttttctggttagtgcctcattgtcttctgctggaaagtaaaaaggatcctcttgtgtcttgagaggcttctataatctaggcacagggttataaggctatagaatttgtccaaactcccttctgaacaataacagatttaggtttgtccatcatatatgtgctaataattgaatggcaaatgtacataaatcccactagtgcctgtttcacttcttttactagccactcctaatcctttcttcctcctcttgaccccatttgggcgggaccagacgggggagaaaactgctactcttggctgcaggccctcaaggcccttcctgaccagctggcccgacccgtccctctccccctcagatccactctctgtgctacaacgattgcaccttctcacgcaacactccgaccaggactttcaactacaacttctccgctttggcaaacactgtcactcttgctggagggccaagcttcacttccaaagggctgaaatacttccatcactttaccctcagtctctgtggaaaccaggtaaggtataccagttgacagggtgaaaattgaatgggggaggcccatggatcagaagccagagacagacacaggagaaaaccagaaatccttcaggtagcagggggttgaggagcttcaaaggtttttacatattattctccctgaggactttttcccctaaaattaaataatcaggattataaacacttaagaaaataaagatatttaaaataatgtgttcttgccgggtgcctggtgcggtggctcacgcctgtaatcccagcactttgggaggccgagacgggcggatcacctgaggtggggagttcgagaccagcctgaccaatatggagaaaccccgtctctactaaaaatacaaaaaaattagctgggcgtggtggtgcatgcctgtaatcccagctactcgagaggctgaggcaggagaatcgcttgaacctgagaggtggaggttgcagtgagctgagattgcgccattgcactccagcctgggcaaaaaggtgaaacttcatctcagaaaaataataaaaaatcaataaaataaaataaaataaggtgttcttttacctgacctttatttcctcaaaatgagtctatttaaaaatatgcaggaggaaggctaggcgcggtggctcacgcctgtaaacccagcactttgggaggcctaggtgggtggatcatgaggtcaggagatcgagaccattctggctaacacggtgaaaccctgtctctactaaaaatacaaaaaaattagccgggcgtggtggcgggcacctgtagtcccagctactcaggaggctgaggcaggacaatggcataaacctggcaggcggagcttgcagtgagcggagatcacgccactacactccagcctgggcgacagagtgagactccgtctcaaaaaaaaaaaaaaacaaaaaagcaaaaaacaaaacaaacaaaaaaaaccccagaaatatgcagaaggaaaggtttttttcccttgcttgaaaaagcagtcttcagcaatcactgcatttgtcgcttgttttctagaggctggataaaatcaactgtttctagttcatccacacgtctctttgctgacagtatgaaagaaagtaacatgaaatgctttataaggaaagattgtcaccatcagccatttcatgctgctgcaaatatttcagatccaaaattcaaaggcagaaatgcaaaggttaatcccaccactgcacttgattaaattgcaacaagccacaattagcagttggaaagttcatttcaaatgttacaaaagaggctgggcatggtggctcacgcctgtaatcccagcaatttggaggccaaggcaggcagatcacctgaggtctggagttcgagaccagcctggtcaacatggtgaaaccctgtttctactaaaaatacaaaaattagcccggcatggtggcacacatctgtaatcccagctactcgggaggctgaggcaggagaattacttgaacccagggggcggagattgcagtgagccaagatcatgccactgcactccagcctggacaacacagcaagactccatctaaaaaaaaaagtgacaatataaagagcatcttgagcatctagtctttgactctgttggtggtaaggcctttacatcatagagctctgacccatcttctgcagcatgcaaagaagtcgatgggtgtttataaagagaacatgtcaagaaataaactaatctatgaaagattagagataggtgtctctatcttgttttcagaagtcttcgaagaagttaaaatgaagcctcagaagtaacaggtcatgatcacttaggaaataagactgattaaagcaggcttcatgtagcaaaagtgtcattcagtgaattatggagagcaatgaaggtggggaatttggggaaatggtgtatttttttatctactcctttcctgtttagaaatgcttatgatgtactgccacacgatagatccttagttcaaagacaaaagaactctattttattgtaatgtaaaggttttcttcagttttcaagctcatctacttcctacaatctagaaaaaaaaaaaaaggctgagacaccagatttagcactttttttttttttgaggtggagtctcactcttttgccaggctagagtgcagtggcacgatctctgctcactgcaacctccgcctcccaggttgaagcgattctcctgcctcagcctcccgagtagctgggactacaggcatgcgccagcacgtccagctaatttttgtgtttttagtaaagacggggtttcaccacgttggccaggatggtctcaatctcttgacctcatgatccacctgcctcggccttccgaagtgctgggattacaggtgtgagtcactgcacccagccagcaccatttataataaaatttataacattgaaaatgttgactgggcacagtggctcacccctgtaatcccaacactctgggagactgaggcaggaagattgcttgagcccaggagttcaagaccagcctgaacaacacagagaggccctatctttacgaaaaaaaaaaaaaaaaattaacctgcggttccagctacttaggaggctgaggcaggaggatcacttgagcccaggagttcaaggctttagtgagctatgattgcaccattgcactccagcccgggcaatagatcaagactctgtctcaaaaagacaaaacaaaacaaaaaaatcaaatctgtctcgtcattagacctgggatgaatcattcccctacaacataccattgaaacgctgaaaatttagatgtaaaaaagccttccctattcccttctgggaattcctctgtgaccactcacttcttcctacttcttcctccccactccccaaccagggtaggaaaatgtctgtgtgcaccgacaatgtcactgacctccggattcctgagggtgagtcagggttctccaaatctatcacagcctacgtctgccaggcagtcatcatccccccagaggtgacaggctacaaggccggggtttcctcacagcctgtcagccttgctgatcgacttattggtgagtaactccgctgcctcagccttgtttgagagtgtgtgtgtgtgtgtgtgtgtgtgtatgtgtaagagagtgtgaggttaccagtctgggaggtaaaaggccccacatgaggggcccaacctcttgacctgtgttttctattccactctgtgtgcaaagtgctcccagggactctgacaaacccttgtttcaccctttcataagccactcagggatgtgatgagatgaagtgaggttggatgttgacaggtattggaagaattgaagtggttgccagctaatgctactagtgagaactaattaggagctctaatttggcaggggtgacaacagatatgactctggatggaatcacctccccagctgaacttttccacctggagtccttgggaataccggacgtgatcttcttttataggtgaagatgagaggctaggctaatgcaagtgaaacctaggactcctccataatttctgctgcatccctccctctctagccacctactgcttatcaagccagaacatgtctgaggtctagcagatctgcccagtcatgatagctaagggctgggagttcctgatcccagcttcctggatattactggagcagatctgccctagaggcaaggagaaatattggatgatctgcagtggacttcccttccagcctaagcaggctccagtgtatgctagccatgactttcctaaaccagggcatttcccccttgactacatattgttgatccccaccctttccacgtataaaccaaggcctgtgcactccctgtgtgccaggctaaagcccaagtcctgacttccccagcaagggaattgctccatgcggatttctcttggtggctgtccaataacacagctgagtgactcattccctcatgggggctggctttctctgcaggtccaatgatgtgacccagtcctgcagttctgggagatcaaccaccatccgcgtcaggtgcagtccacagaaaactgtccctggaagtttgctgctgccagggtaagccctgcaaagggatgtaacaaaggccaaaatctcccttgaagtcattccatcctgagatccagagattactgaaaaagagcaaaaaagaaaagagtttgagatccattaatgggtgcttaggggcacagtcatggccccagaccctcagtcttcatatggcaagaatggggtagaaggaagagtgaaagctattctcatattcctggtccattaaggcagcagctgcgtagcatggtaaccaacagctcggctgagagccaggttgaatcatctcctccactaaccagctatgttatcatggatgcatttcttaccttctttaggcctcttttttccatatctgtaaaaatgggcataatgctaaattccctcagcgggttgttttgaggattaaatgagacaaggagactttaggacgtttcatgatctctggctattatgaggattagtaaaggtttagggatcctaggaatctctctgcaacgaaaatacccagttctgaggttaatagctgagtgaactaaatcaaaaatttctaaatgaatatgaccacaggacaccccctcccctccccgcataacagcagctaacatcttgacgggcactagcgtcttgaggaagacgttttggatatgctgcgcctaaactgactggggagatggggagcaaagcagggcgtcttgacccagtagtggtgtctgagtgtcaaatccctgttcttgccattgtaaacatcacagtaaagtacataacaggtatccataccggaagttcattcctgaaccccacctcaactccaatcccaccccgaggaagctgcatcaaagtggctattgcaaaatgtcacaagtctgtggggaggacaggaacctcaaaggggttgatgagacagccatgctggagctcagacaccttacaatagctctcataagatgtcagcaaaaacataaacgggcagagggtggggagcccactggaggccaggaaggcctcttatcagtgaaatcagagatcaaaacctgtgttaaggactagttggaaggatcctggtagggctaatggtttgggcagggagagggtaaatcaggcaagctatgagacaacaggcttccaaccagatcttccccacccctccagcgagtgagagctcaggtctcttttctgctttgctagaacgtgctcggatgggacctgtgatggctgcaacttccacttcctgtgggagagcgcggctgcttgcccgctctgctcagtggctgactaccatgctatcgtcagcagctgtgtggctgggatccaggtgggtttccctctgatcgggcacttccatgagagaagggaatgggagatctgagttccttgtttttctccccaacagaagactacttacgtgtggcgagaacccaagctatgctctggtggcatttctctgcctgagcagagagtcaccatctgcaaaaccatagatttctggctgaaagtgggcatctctgcaggcacctgtactgccatcctgctcaccgtcttgacctgctacttttggaaaaagaatcaaaagtacatgttgcggtattggagtgtggggatggacagggttggattattgatcagggagaatatctgaaagtataaattaatggggtttttctctggagttggctacagactctgtgacttatccagtgcatggtttggttatcctgactcctgaacagggatggtaccacgtggcagtctataaatggatgttaaattctcaaaagcaaagagtatcctcagtttgctattattaacagtacagagaatgacattatgattttgatatttccattaaattttgagatcatagaaacagacagccttaaggaacaaagatcactgaactgggaactaagattccttctattaccccagccctgacaccattttaccatgcttcagtctccttacccatggcatgggaataggacctgttcatagcctaacctctctacctctttcccccttattcccacattttgggatcttgtctttcccatcctcctgttttatagactagagtacaagtactccaagctggtgatgaatgctactctcaaggactgtgacctgccagcagctgacagctgcgccatcatggaaggcgaggatgtagaggacgacctcatctttaccagcaagaagtcactctttgggaagatcaaatcatttacctccaaggtaggggtcctggccagtgcactgaggtcagcctggagggctggaggagacactgctcctcagacactgaatggtcctgtaccgttcagggatgggcaccctgctccccacgcccgatacaattccatttccccactctgaaaatcctgccttctccttctgtgtttctacaccaatactctttcccccggggcccaaggctgctcttgatcaggctccttctctctcaacatgcactccagttagtgaactgtttgggccttttcacttccagaaggagtactgaaccatctatgttgtaagaatcatcccctactcctttttttattttcactgaaaagggaaaaggtgatctctgggatcaacttctgatagaagtcaggctctcctttgaccagtggggggtgctgtcttccaggtgtctgggtccagtcctttgggagctgaatcatagttcagtctcagctgttccccactgagcaattctgagctgggagggctggctttgtgtgggtgggtgagtatgaagcttataaatgcaatacagacaatactgtcactgggtgtggggccagcagacagcatacaagcaggtcctccagggctatagtcctctgcagcacaactctgccagtgcccatacctgactactgctctgaaccagttcatcccaataggagtgggtggggagggcggaaagagggaggagggtattgggaggtggtgaagaaaggaccgtgcttgggtgtttagattgctaagtcttgtttcctttgtgctgacctgctagggagactcccttggcctccttagactgcgatttctttttttttaaatgaatgggagaacagttcaccctgggactcttgagtctatctgggactgctagaattcagcaaaggtgcaaagcaggggatttttaagatttttggctcatgcctgtaatcccagcactttgggaggcccaggctggaggatctcttgaggctgggagttcaagatcagcctagacaacataggaagaccccatctctacaaaataaaaaacaatcagctgggtgttgtggagcatgccagtagtctcagctacttgggaggctgaggtgggaggatcacttgagcccaggagttggaggctgcactgaactatgattgtgccattgcactccagcctgggcaacagagcgagaccctgtctctaaaaaacatgtatttatttatttatttattgagacggagtgttgctctgtctcccaggctggagtgcagtggcatgatctcagctcactgcaacctccacctcccaggttcaagtggttctcctgccttagcctccctagatgctgggattacaggtgcttgccatcacacctggctaattttttttttttgtatttttagtagagacagggtttcaccatgttggccaggctggtcttgaactcctgacctcaggtgatctgcctgctttggcctcccaaagtgctgggatcacaggtgtgagccactgtgcctggccaaaaacatttttttaaaagaaaaaaatttttttttttttgagacagagtttcgctcttgttgcccaggctggagtgcagtggcatgatcttggcttactgcaacctctgttcccgggttcaagcgattctccttcctcagcctcccaggtagttgcgattataggcgcctgccaccatgcctggctaatttttgtattttcggtagagacagggtctcaccatgttggtcaggctggtctcgaactcctaacctcaggtgatccacctgccttggcctcccaagtgctgggattacaggcatgagccaccacaccccgcctaaaagaaaaagatttttattgttctccaactgaccctgaagggagcaagcagaatagagggtatctcatttctgtgtttccacaaagccactgaaacaggaatttcataagggttccttctgtcacctattttccatttctctcctttgtccccaaacttgcccctgtgcagcagccagctcctgtcaccatctctctttcagaggactcctgatggatttgactcagtgccgctgaagacatcctcaggaggcctagacatggacctgtgagaggcactgcctgcctcacctgcctcctcaccttgcatagcacctttgcaagcctgcggcgatttgggtgccagcatcctgcaacacccactgctggaaatctcttcattgtggccttatcagatgtttgaatttcagatctttttttatagagtacccaaaccctcctttctgcttgcctcaaacctgccaaatatacccacactttgtttgtaaattatgcccttgcttgtatcttgtttcccaaaatggcccatccgccagagccatagcttcgtctgctcataattcttatagctttggaatgaaaatatttctatcttcttaagtatagaaactatttcctctgtcctctaacttaagggcagaaacagctgggagttttcctcgcatgccctcagctcatgatctcttcaggagagaggctgggtgaggagggtgtcggggttccctggtggataatcttcatagcagcctggatccatttcccctggataaccagctcaaagggagtgaaaatggtagtctgagggcaaggggagcaaggcctgggtaagaaaagccttgaaaagcataaaaagaggccgggcgcggtggctcacgcctgtaatcccagcactttgggaggccgaggcgggcagatcatgaggtcgggagattgagaccatcctggctaacacggtgaaaccccgtctctactaaaaatacaaaaaattagccgggcgtggtggcgggtgcctgtagtcccagctactcgggaggctgaggcgggagaatagcgtgaacctggaaggcggagcttgcagtgagccgagatcgcgccactgcactccatccagcctgggtgacagagtgagactctgcctcaaaaaaaaaaaaaaaaaaaaagaaaagcacaaagagaggcaacaaggaatgtttttgtttttgagacaggctctcactctgtcacctaggctggagtgcagtggcataatcactgttcagtgcagcctcaagctcttgggctcaagctatcctcccatctcaacctctcaagtagctaggactacaagtgtgcaccaccaggctcactaatttttatattttttgtagacacagggtttcaccatgttgcccaggctggtctccaactcctgggctcaagtgatctgtccgcctcagcctcccaaactgctgggattacaggcataagccactgcactcagccttttatttgttttttaaaccacgtagctcattgccttctcttaagtaaatgatagatattctcactgaagccaaaggaataagttcatcaagaaaatgcccaaagccctggtggatacatcctccctatcttttttttaaaccttccactatcactctatgacactgaaaagaaccaggtaagccccaaacccagatgttccagccttatcctctgttgggtttacccacagacatagcaaaccctgtcagtgaggaaaattccccatccttgagtgcccccgtcctagaagtttgggccatattatggaacaggggtctcttatttgaaaagagcacaaggaggccaagattttaatggggcactttaggggatacagcccacaatggcatgggcctgaggtggccgtgatgtctgcttctaagcttaacgcatctgctcaggcacagaataaacgtctaggctggccaaaaaaggaactgaatcccaggcccatacgccagcaccagaatcaaaccagtcttcaaggaaggaaggctaggagagtttaacaagattttcactgggcccagcatggtggctcacacctgtaatcccaaggcagaatggtggcttgagctcaggagttcaagaccagcctgggcaacacagtgagaccctgtctctaaaaaatttaaaaataaacaaggtgttcaccaagctgggatacttctcactattaagcccctatctttctctttttttcattctcaattgctttgtgtgataaaaaactaaagagacttctggtccaatttctggcaacatcccttctgaaaggtgagtagagtgggtgtcttctatgcccattttccccaattttacacaaactattatcaatgaacttttaagtacctagaatgggtaaaaccagagcaagactttaaattaccttcttctttcttctactggcagttctgcctccatcactatcaggctagggtgaccttcccttggtcaagccccaattgcccatgatttgtgcctgtgccctttctccagtgaccatttggtgaccagatggtagatatagaaaggggatggcatttgcaagtgactagtctgccacaaaatgctcatctgattagccactgctgccctggcaatggctttgtaagagtcaatgagaactagagccaggctgtggtccctggccatcaacagtgttggtgacggcagggagtccctttggtttaataaatccagtttttctttgggtatccaaattctcccctccttttgtaggagtcaggctctcagaacctgtgtccatgttggaacttcccccagtgtggatgcagatacgcagctcctgagctccagcctaaagtcttctgtagcctcagcaatacttgggcacctgctgtctcactgaatagctttcttttgtgacaaaggccacagacagcccttagactattccggaaacagtaggaaaaattacatatgtctttgacttctttattctgactccactgattttagccataatactttaaggagctactttttactaccccttaccgtgctgacttctgcaggtctgccctgtgacctgtcaggaactcctgagttacgctactggggtcacctgttgctcccctagcaagttaggcatgtcatatatttttaacagctttattgagatataattcacatattacacaattcacctttaaaacatacgattcaatggttttcagcaaactcacagagttgtccgcccacttgagagcaaacacatgttcaattttcttttcctttttttttttgagacagagtcagctttgttgcccaggctggagtgcagtgccatgatcttggctcactgcagcctccccatcctgggttcaagtgatccttctgcttcagcctccccagtagctgggattacaagcatgcgccaccacgcctagctaatttttgtgtttttagtagagatggggtttcaccatgttggccaggctggtctcaaactcctggactcaagtgatccacccacctcggcctcccaaagtgctgggattacaggtgtaagccaccgtgcctggcctacatgttcaattttctatgaacaaaggctttagtccttgacccagggctaaagtggtctgtccaagctgttgttggtagagggagtatgataaaatgtttaaatctcatttggttaccttgagtcctggaacatgcagtaactgtcatgctatagacatcatctgtatttggctgggaatacaaatgaagattgtggtgtattcaagcagtagggtttttgcttttgtttttgttttagtgccaacaaaacttttttttgtctgactacattaaagataagactgactatatttatacaacagaaactttgtaatagattttttcagctttgtgaaatcgaattttttttcatcagggctggttggatttcctttttaccctgtaatccaagcgttaatagtttgttagaagatgggttattgcatgtcactttttttttttgtaaaataaaaacataccttac

SEQ ID NO: 751 - DNA, 3941 bp, Homo sapiens
actggtgctgaaccccgccgcgcgcgctttgaatttcccagccgctaagcgcctctcctggtcggtgtcccaggcagaaaggtgcagagacccatctgacgcaggactccaggtattttaggagggacccatcggcttgcttaattccctgggggattcgtctgaggctctttgcctctgcaaggggagaaccagccacagtttcccggaaggaataacaattactttaattctagctgaggactagactgctatggtccaaagagtcaggaaacgattgcaaggcaatcgttggcacagagaacagagcgactgaagttacaatccagcattttgtgaatctctgccttaggccagccagggcggagagggattaaaacaagctccgaagtgtgtattacaacacagttgagataggacaaaagaaaaacagttgtttttcgctcactgaaaaaatagtttgcaatagcggcaagcaagagcagtttgccttgtttcgggaaaggcaggaagaaacaccccgaaagtattaataggagaaaaggaacaggatttactgcaccttgcgggactcgctctgacgatccttgtgcctttgtgcactgcaggtagacaagctccagcagagagtggccagatgtggtgcctggagcgactccgcttgggtcctgagtgccttcggcggagcggagactggcttctcccgggtcgggcccgcggagccaagtctcgcaccaccgccgcgtgcgcaaatgtgctcactccggaccgcatccctgagttctgcatcccgccacggctcatgccccgcctggccttggctgcgctccggaattcttgggtcgaagaagcagggatggacgagggcgccggccgcacagactgggacccgcgctcgcaggccgcgctgtcactgccgcacctgccccgtgtgcgcaccgcctacggcttctgcgcgctgctcgagagcccgcacacgcgccgcaaggagtcgctcctgctcgggggcccgcccgcgccccggccccgggcccacacctacggcggcggcggcggcccggacgccctcctggggaccctgcgcgtcccgcgagctccgggcccggcgacccccgcggcccccggctgtccccgcccgccccaggacgcgctcgcccggcggccccgcggctgccgcctcctgcgcgtccccgacgggctgctgagtcgcgcgctgcgggctgggaggagtcgccgcctgacccgcgtccgctccgtctccagcgggaacgaggacaaggagcgccgcgcgggctcccagtccccggcccgggccccctccacgagcccgccgtcgtcccgggtcccgtttcccgagcgcctggaggccgagggcaccgtggctctgggccgcgccggcgacgccctgcgcctggccgccgagtactgtccgggaaccgggcggctccgcctccggctgctccgcgccgagagcccggccggaggcgcccccgggccccgagccgtcagctgtcgcctcagcctcgtcctgcggccgccgggcaccgcgcttcggcaatgcagcactgtggtggggcgcagccgcaaggcctcctttgaccaggacttctgcttcgacggcctctcggaggacgaagtgcgccgcctggccgttcgagtcaaggcccgggacgagggccgcggccgggagcggggccgcctgctgggccagggtgagctgtccctgggcgccctcctgctgctctgagggcccagccctccccggggcgctctgcccgggggactccggacactgacagccgcgtggtacaaaataaacgtgtatttgttgttcttatcagtcccgtttcagtacaacactggcagagatgattctagattaactatcccagtaaaagatatgatattttccatagatacctccagaatttttttcagcaaatggaatggttctacagtgtttcccaatatagacagccatttgcataccatatgtaccacacacgcctaggaaataatgaatcacatgaagtgttagaactagaaagtgtcttggcgatctgtttgctccaatcacctcattttaaaattggtgctttccacaacatgcatggagaccatcttggagcatttacttttgaagcattttgtttaagaccccggataagaaaatgagggcaaaagaggtgaagtgacttgtccaagatcaacagtgaattattagttggaacgccagcctgatactcctagctatatctcactggaaaagcattggagaaaatgaaaccattttaatattctaagcttaaataatagttataataggctaggtgtggcggctcacgcctgtaatcctggcactttgggaggccgaggcgggcagatggcttgagcccaggaatttgagaccaggctgggcaacatgggaagaccgcgtctccataaaaaatacaaaatttagccggacgtggtggcacgcacctgtagttccagctactctggggctgaggcgcaaggatcacttgagcctgggaggtcaaggctgcagtgagccgagatcgtgccactgcactccaacctgggcaaccggagtgagaccctgtctgcaaataataataataataataaatagttttacaagcgttaatttatgttttaacccccaaaaggaggcactgctatgcccattttacagatgaggatattgaggcacagaataaagagcagagccagaatttgaacctagacaatcagcatttcactcattactcttatgtaggtaataccacagtgtctaaagggctcgctattaaagttgcgagtattgtgcaacttctctctgaaactgttgacactgaagttcgtgtctacttgtattcctcatcctgcttttggtgaaaaaacaaattgcttgaaatgaataatttattatctcatgctaataacttcaggcattgagatgagctgatgggtctaaagctctgaggaggaagctaaccggcctcagaatcatagaaatgggtgccagccttgttgtaaccaggtgagtttatctgctggaacaggcagtggagagtgtacagatagcatggttttacctctggcttctgataataattccagatttaacaatcctgttttagaggacgattttccctcatcccttgaattcactgccagcagggcatttttttcttttttttatgcaaataggaaaatgcatcctaaatgagggtttaaaaaattgaaaatatttaaatatacaggatggtgttaaatatgactccattatcaatctggattcagaaatggtttctgctttattttatttcattttatcttttagaaacaaggcgtcactctgtcacccaggctggagtgcagtggtgtgatcatagctcactgcagcctctacctcctgacacaagctgtcatcccgctttggcttctcaaagtgctaggattataggcgtgagccaccatgcccgaccagtttctgcttttattaaaattgttcacagttttatacattcatgttcattaaaaatgctatttagaaaagagtttgataaaataaatattatacaaaattcgaagaaaaaagaaaagagtttctgtttcagtcacaaattagggttattgtgatgtgtatttatgatgaccattgaacaaatgtgaagaatactgtgaattctatgactttatcaaaatcagccacatccaggagcttgcagttgttgaccaaatgaatgatgacatagagtagttcagatctatcatgtgctcttctatctaatcagtcaatatttccttggccctcaagccaacattcattttttatgtataaccttcttcatgattttgaaattttgatagggtaactgctaatgagttcacaaatgtagcactttaaaaggaaaataaatggagagtgaaaacaa

SEQ ID NO: 752 - DNA, 6902 bp, Homo sapiens
cagcggagaccgggtgagcaccggctggttcctcgcggtgttcctgcaggcttggcggccgcggtggtgcgatcagcaaagggcaccgggatgccggttgtgcgtgtcctcaggtgtcccgaacaagcgtgagtggcatgtgctcacctgagcgcggcggcttggcggccccgggcgtgtgggtgggggcgcggcggagagctgaggccgggcacccgggctggaccgacgggccctctcccaagcaccgcccgcagccaggcggctcctcgagcgcagcaactttgggactttgttccggctttttccaaatcgaatctggtcgagggggcggggcggggggggagcacctgccctgcggggggtgccgggagagaagtgaaggaaagccccgcccccgcccctcccgctccccgccctctcccccgcccccggggctcttcataagctcggcccgagggcgagcagagaaagcgagtgtccctctcgcgccccaggccggtgtacccccgcactccgcgccccggcctagaagctctctctccccgctccccggcccggcccccgccccgccccgccccagcccgctgggccgccatggagcgctggccttggccgtcgggcggcgcctggctgctcgtggctgcccgcgcgctgctgcagctgctgcgctcagacctgcgtctgggccgcccgctgctggcggcgctggcgctgctggccgcgctcgactggctgtgccagcgcctgctgcccccgccggccgcactcgccgtgctggccgccgccggctggatcgcgttgtcccgcctggcgcgcccgcagcgcctgccggtggccactcgcgcggtgctcatcaccggtgagtgcgcgggtcgcggagcgcggggactccaggctcgagggcgggactggacactcaacaggactgactccccatgggcacagccaaggcgggctcctcagcgcaagagtgggagagttctccacccctgggtgcagggagcgagccaaatagggagcgccgggcacctccccaagcccgggttcactacctgccgctgcggggagtgttggagggaaagtgagacagggagtgggccggttcgagaaggaaactgactggtggctgagaagagggaacctcctggagtttgagagtttatgccattcccttccccaagagagcagtctcaggggacttcggaggccttgagaagggaggatcgttaccccttgaactctgcctgacatccccacctaagatacccatctcccattcctcgggccagagggaagagcttagatggggaacttccccaccccacccatcccccactggctgggatccttggagttcagaaaagctagaggtcaccgtgaggggcagctggacattcagctgtctttctgtctagccacccactgccaaactgctgaggcagtagtttggagcctacacccagcaccccacccccaagccctcctggtcctctgtgcccaggaaggagctcttagagagctgggctcaggtgcctctggccgcctagctgagctcctttgtctggagcagggaataaatctgtcaccagagggagggaaggggaaggggggggggggctggaggcccgccggaagtggggagggggagaaaggccagggggcactgactccattgcatcgtgggaggagcagcctggtctctcgccaatacccacggctttggacaggtgctccaggctttgtccttgcgctgggcctttgctggggcagccagcaacctggcttctcagagacctcggtctagtaggggccctgtgtgatcagatggggctgggagaattttccggaggaggaaatccttgagtggggccttggagcatgagtggagataagtggagtatgaaagggatctcggatcagagaaaggatgtgggacaaaggcttaaggcaggagtacacacggtctctgtaggggacagccagtctgggtgtgggggtggggagaaggggatatgaggtggtttccttgggaggggccatgaatcaggtaagaagccagactgctgaggcagagtaggggggaaggaggcacaagggccttgcactccagcaaagatggtagagatggggaagcattcgggctggacaggagagacccaggttccaggcgcagtgtgaagcctcagcagaccccagtttcagaggtttgaggaaggaaaatcaacagacaccccgggtatgaagtaggggccaggttgtgggctctgcctctggggacagggcagatcccttcctgctttatttgtgagccacctcaacaggacccaggccatctgcaggtactagtggcctagctgggtagtctttcctgaggtctcacctcaggcctttgtgctgctgctgttgcttctggccttgagcctgagagagaggtgagaggaaggatgctttctctaacttgggctcctccaatctctggttgcaaagctggggttgggggagagaggaccacccaacctgccctgtacaagcatcagtaagactccaagtttcccagggcccgaacacttgggggttgtctctcaacacccggctggaagacaagtaggtaaccaggttcagccccacctgccaagaacactgtgttttgggcctggcagagctgctactccccctctccctcctaagaatgcccagagaatcacttgccaaggctactcctggagctcagctgtgggatcagggtttgggctgaggatcaggtgcctgtgtgcacacatgtgcacatgtgtgtgccaatgggtggtagggattgagcccgttgtgagaacatccagccaggttggaagtgtgtacaggtatctgagggtgtgcacgtgagcaagagggtgtgcaagatgtgggtgactgttgggaccacagagctgaggcctgtggtcagctcaggtcagaactgggaggtctgtttcccttgggaggacctgtctgctctgagggggacccggacaagtgcacatatgcatgtgtgtgtctacacacacacacacacacacacacacacacacacacacacatatgcttgcctccctctccaaggcagacttgcctgggaagtacccctcctcagcaggagctcgaagacccctgcccagtgctgttttcagtagagggagtggagctgagatggggagaccgtactgagcggtccaggagtagggaaacagagctgctttgcagcttctgttccagaagatgggggttggggggcggggttgagggccaggggtgggagcaggagcagaacagaaagcctccctgctcactggcctttccccttccctcactggctgcccatggagccaggatcagcatgggaacaatcaaggaggcaggggcttatcagtactatggacccctacactggctctgcctggtggttcttctcttcgcataccaaagacagaaattaagcctccaagagtggtaactgacctcggtcacacttggtgggtgtgggaaaggattcaaatgtaggtctgttctcttcttcatctatcatggtccctgtcctggaggcaagtcgtctggggctcagaaaacacccctgttgccactgattggaattccaagggtctgggtgaagtggggatgggcctccagcttgcctccagcctgaaaaaatagtagagggtgttgaggctgggaagggaggtggggctcatgttgtacagggcctgagccagggagcttgggcttcattctgagtactgtggcagccctgggaaggtttgtagcacagagggatattgtcatttttggaaagatccctttggctgcttaggtagagaagggcttcaagagggcaggaagggacaggactacagaaggggctgcttcagagtccagattaaggaaggagaggcctgggcagtcagaaaggaagagaagccggatgtggtggcttgtatcttcaatcccagcactttgagaggccaaggtgggaggatcacttgagcccaggagttcaaaaccagcttgggcaacatagtgagactcccatctctccaaaaaaatttaaaaaccagccaggtagactgggcgcagtggctcacgcctgtaatcccagaactttgggaggccgaggcaggcagatcacgaggtcaagagttagagaccagcctgaccaacatggtgaaaccccgtctctactaaaaatacaaaacttagccaggcctgtggtgatgcgcacctgtagtctcagctactcaggaggctgaggcaggagaatcgcttgaacccgggaggcagaggttgcactgagctgagatcacgccactgcactccagcctgggcaacagagtgagactccgtctcaaacaaaaaaaaaaaaaaagaaaaaaccagccaggcgtggtgacacaggcctgtagtcccagctactcaggagaccgaggaggaaggaatgcttgggcccaggaggggaggttgcagtgagccaagatcatgccactgcactccagcctgggcaacagagcgagaccctgtctcaaaaaaaaaaaaaaaaaaaagagaaagggaggctcctactaatactgtgcctgtgcctgtgagctgtggcctgaaatcaagaaagcagaaccacactggggcctgggactgtcccagacctgacctgtgtgaatttgggaagcaacttagcattactaggccttagtttcctcttctgtaagccacattagtggggtagccacggggagtcaggcagatgacagctgtcacagagttactgcccagggctcagctagagggacacagcctgccagggatgggcctagggaaggagttagggttgttgactgctggtggcttggtttgcaggggcctggatcccatccagaccctggtgattctggggttgtctcaggctaggctgggccacagtggaagttcactgactgccctggcctggccaggctgtgactctggttttggcaaggagacggccaagaaactggactccatgggcttcacggtgctggccaccgtattggagttgaacagccccggtgccatcgagctgcgtacctgctgctcccctcgcctaaggctgctgcagatggacctgaccaaaccaggagacattagccgcgtgctagagttcaccaaggcccacaccaccagcaccggtcagtggcaagtgtccaccaggcaagggcgtggcaggggagtgggaaggacacggggactggaagtttgctgctgggctgacctaaggcttccctcctctgctctgtgaccccaggcctgtggggcctcgtcaacaacgcaggccacaatgaagtagttgctgatgcggagctgtctccagtggccactttccgtagctgcatggaggtgaatttctttggcgcgctcgagctgaccaagggcctcctgcccctgctgcgcagctcaaggggccgcatcgtgactgtggggagcccagcgggtgagtgcccccccccactggagcaaaaaggagccccctggggtgggggagggcttagggagccccttgccaaagctgagctgccccactcccaatccatccgcaggggacatgccatatccgtgcttgggggcctatggaacctccaaagcggccgtggcgctactcatggacacattcagctgtgaactccttccctggggggtcaaggtcagcatcatccagcctggctgcttcaagacaggtgggaatcagggctgggggtggggtgggggtggggaatggggctgggaatggtcttatgggggcaggtcaggtttgatgaatggtcatggttttggttgggggtgtagttttggctgcagacctggcgcgggttaaacagtcctaattggctttggctcccctagctgatcccactctgaccttgccactccttccccagagtcagtgagaaacgtgggtcagtgggaaaagcgcaagcaattgctgctggccaacctgcctcaagagctgctgcaggcctacggcaaggactacatcgagcacttgcatgggcagttcctgcactcgctacgcctggccatgtccgacctcaccccagttgtagatgccatcacagatgcgctgctggcagctcggccccgccgccgctattaccccggccagggcctggggctcatgtacttcatccactactacctgcctgaaggcctgcggcgccgcttcctgcaggccttcttcatcagtcactgtctgcctcgagcactgcagcctggccagcctggcactaccccaccacaggacgcagcccaggacccaaacctgagccccggcccttccccagcagtggctcggtgagccatgtgcacctatggcccagccactgcagcacaggaggctccgtgagcccttggttcctccccgaaaacccccagcattacgatcccccaagtgtcctggaccctggcctaaagaatcccacccccacttcatgcccactgccgatgcccaatccaggcccggtgaggccaaggtttcccagtgagcctctgcgcctctccactgtttcatgagcccaaacaccctcctggcacaacgctctaccctgcagcttggagaactccgctggatggggagtctcatgcaagacttcactgcagcctttcacaggactctgcagatagtgcctctgcaaactaaggagtgactaggtgggttggggaccccctcaggattgtttctcggcaccagtgcctcagtgctgcaattgagggctaaatcccaagtgtctcttgactggctcaagaattagggccccaactacacacccccaagccacagggaagcatgtactgtacttcccaattgccacattttaaataaagacaaatttttatttcttctaaaa

SEQ ID NO: 753 - DNA, 3536 bp, Homo sapiens
agggcttggacctggtataaaacatctggaagtttccagggggctgctttgcatctgaaactgtcaggtgaggggtgacagagatgcctgaatctgagttgggggggaattcaaatctgagctggcgaagaggatgcctggaaggaatggcaggaaagacttgagttaattggcgcttctgggtctgcagtaatcttaggtgcaaagctgtctaggtctctgctgaaggactggggacacctgggatgttcaggagaatagaaatggccagatgtgtgttagtggagaaaagaatagtgacacatagaccaggcacctggggtctaatatcttgagctggtcccgactccttctgcaacttctctgtctgtcctagttccaccagcactgcttggatactggtgctggcacagttccttctgtcaccaactttgctccccaggtaacatagaggcaactctaaaatgcttctttccttgagaccaggtggatgccagggatttaaaccatgctccaggtgccccataatccaggccaattcaccacagatgatgaggctttctttgctcagcctctgggctcagtaaactcagccatctctttgcttgggagaggtcctctactccctccttagaaaactcgtttcctggctatggccataccaacccaaatgtacctgggcttggctgacttcagaaaacttttctgctttgtgccaggatggaataaggcttaatccagatagttagagttcatcttcaggcctgagagaaaaagaggagggcttggctacagccagaccagggagagctggaggggtcagggacattgaaggtagcatcagagaggaacaggactacaggctatggacagtcctttctaagctcaagactgggtctgctaggtctaagttgaaggacgaagaaggcttggtctgagctgcaggtcaggagtgcctgggtcaatcaagtcaacaaggaagaaggtgaatcttcatttgctcttttcttcccactccagccccagaatgttgacagtcgctctcctagcccttctctgtgcctcagcctctggcaatgccagtaagtgagataccaggagcctggtattggggacttgggaaggcagccttgggcactgctgttggccaaggcttttggaggttggcttggggtggggagctgagttgtcggaggaacaggggtgatgcagagaaactgaactcctggaagatttctccctccaactcctgcttgcccctccagttcaggccaggtcttcctcctatagtggagagtatggaggtggtggtggaaagcgattctctcattctggcaaccagttggacggccccatcaccgccctccgggtccgagtcaacacatactacatcgtagggtaagattctttgaattcctggctgggcgcggtggctcacatctgtcattacaatgctttgggaggcagaggcagatcgcttgaggccaggagttctagctcagcctgggcaagatgccagggatgccagggatttaaaccatgctccaggtaccaagaccccatctctaccgaagaaaaacaaaaaaattagccaggcatggtggtgagtacctgtagcctcaactactcaggagggagaggcgggaggattgcctgagcccaggatgttgaggctgcagtgagccaagatcatgccactgcactccagcctgggtgacagagtctctttgttggcaaaatgagttgaagttccctgtaggatcttccagggttcacccaggcttcacagtctgtaggactagccagagacctctcatccctatcatcacctttctttctccttccttcctcccctcttcctcagtcttcaggtgcgctatggcaaggtgtggagcgactatgtgggtggtcgcaacggagacctggaggagatctttctgcaccctggggaatcagtgatccaggtttctgggaagtacaagtggtacctgaagaagctgttatttgtgacagacaagggccgctatctgtcttttgggaaagacagtggcacaagtttcaatgccgtccccttgcaccccaacaccgtgctccgcttcatcagtggccggtctggttctctcatcgatgccattggcctgcactgggatgtttaccccagtagctgcagcagatgctgagcctcctctccttggcaggggcactgtgatgaggagtaagaactcccttatcactaacccccatccaaatggctcaataaaaaaaatatggttaaggctagtctgtgtgggggcatctgtggctgggatatctgcctcctgacttagccggggacgtgcaaatctcacttctggctggctttggacatctgtctggaagatgggaagatgagggagaggtatgtaagaatcctgggctttgtgctataatttatcaagaggagatgagattctggcttgcatcaacgctcttcaaggacagctccttggaacattgatccaaactggagtcatgggtctgagggcaaggcctagttgtggcttacaccaaaaccccagatgtcccactctccagctctcctcacccctggtcctccccttgagaaagtggtgaactcacttgctgtgtgtgggtggccaggaccattagcctttgttctttcccagaacccacctgactcctgaaacttagctgaagtctgtgcccgaggaccctgccctgttaccaggcccagttcctcctcacctctacccatgagccccggtgtcctgctaagccctctcagatctgggattcctccttcctcaggaagccaccaccttctcagcagtggaaaccctgcccacactatgctcttaggctttagccatcagaaggttacagtggactgcgggaggctgacactaggctgaactcattaaggaatgaatgggaggtgagaagacacaggcagcaagaatcgagtgtttcaagaagtttggctgtggtttgccagaaataggcaagtcagttttcgggggtgtaaggaaaaagggttttgtgtctttttaaaatcctagacaggagagtcacaagcatgttcacatgataaagaggaagaaagagaaagaggctggagattctgaaaagagatcactggtgaggtctcaaaagagatagaagaggatggttatgtagttggggaaagaaattttaagaagggaagaaaattaaaatgagtgaaggtatacgttagttttgtaaaagttatcaatatctggctgggcacagtgctcacacctgtaatcccagcactttgggaggccaaggcaggcagatcatttgaggtcaggagttggagacaagcctccaacatggtaaaaccctgtctctactaaaaatacaaaaattagccaggtgtggtggcagtcacctgtaatcccagctacttgggaggctgaggcatgagaatcacttgaatgctggaggcagaggttacaatgagttgagacagcacaactgcaccccagcctggatgacagagtgagactccatct

SEQ ID NO: 754 - DNA, 66566 bp, Homo sapiens
agcccaccagaggcaaaaagaggacagtctcacggtccccaagcccagagaccactgggaggggagcaagtggggtctggaccaccgaccttagcttcacctcaacccccaagaacacctgccccgttggaggtaaggcctggaaatttgcatttttttttaaaaagtctggctttctcaataactcttatatggaatgacatttgagaatcactggagatattacctatacacccccaacacacacacatacacacacacacacgcacacgcatacacacacacatgtgattgttctgaccagaaccttgagcattctgtcccttatatgaggtgcttctgtctctaatcacagcctccctggccaggagacccctgcttcccatctgggtcccctttccctcactgacagcaggcccgactagcactgatccccgtgatggcattttgtaaactcctgtggccagccaaccctgctcgttagtggcacattcttctgtttttgtttgtatgtttagttgtatgccgtacttttgattcatgaagataagatctcactggcattaagctatttttatcttttaaacatgaccttgaatacctatgctctgatcctgtgtgagctgcctttgcagttttattgtcagaaagtaattatgtcattactttcaacttttggggcaacagccttgtcagtcacttcatctagaacaacaaatactttattattattattaattctattattttgcttaatctcatgctataggcaagatcatggcctatgatcctgtctggtcctatgctgtgacattagtagtggttttgtatgtgcccagttatttttggatattaatttatgtatttttcttttgtttttcccttttctctccctcaggcagactggagctggctgtggattttatttctcaggagaaggaggtgggagctggagagagtgacccgtgcatctttccagcttttccttggccacctgggtggcatgggagctgggagtcagagttctgctgagctgtaggaccaaaggccactggctccgctgcacctgcggactgagacacccacctgctgagtgagacccagcctctgcgtgcttaggggtcccctgctacagggcattgaggtgaggtccgcctttgcccagtgtgagagcgctgctttcagagctttgagaaggctgttatcatttgtttctttttgaacttgccacctccccacttagagaatatttctggggacagagtttcgtaactcctgccgcatagttggtgcctgctctcgactacattaaatctattttcagtgcccctctggcaacaaaataatgcttttatttctcacatccctggcaacactgggtttatttttatttatcgttactgtctcaagtacgtgggattttaatactttaatatcatcctcattcctttccttccacgtctgtgccgtgtacatttttcaggtggacagaaattgttttcacagcttcttgctcattcatatctttcctggaatccccccattctgcctctcacaggcagccccagagctctgtccaccggctgaccctccctccctggggagctcctctgggccccggctccaagtagcacttccctgctggcgccccccaagttcacatctccatcccctcaactccaactgcctgccaccacctgctcttcccagtttaattagcacctcaagttgaacgtgtccaaggccaagttcttgatgtcatcttgcacatccgctttccccatctccgtcagtggcggctccattccttcagctgttcagactaaaatccctggggtcacctctgactgcccagttcccctcagtccccacattccatttgctagtcctccattcccactccccgctctaggatgtcttgagcactattgtacaagccttcttctaggatctcccctccttggcactgctcctggcacgtcgtttgtaacacagcagataggccgggtgcggtggctcacgcctgtaatcccagcactttggaaggccaaggtgggcggatcacttaaggtcaggtgttcaagaccagcctggccaacatggtgaaaccccatctctactaaaaaaaaaatgtaacacagcaaagagcagactgtttcttctgaagtgttaaccagggtatgtgatttctctggtcccagccatccagaatacaattctgaatccttcctgcagtgttcagggccttccataatgcactctcactgccctcatgaaggctcctcccccagcagaggcacctgctgcttctcctgcgtatggacaccctcccagactcctgccggagatggagccccttcgatggtcaggctggcctcttatcctggctttacatttttttttttttttggcactggcactgcacattcattatgtgttagtttgtgccttccctgctgggacacaagcttcaggaagctgcatgttctgctctctttgaacttcccagcacaggtgggcagtaaatgtgtgcagccatcctgcagagcagatgcagggggtgcaggtgtggggcctccatcgttttcctcattgtttcttttctttttctttttctttttttttgagacagagtctctctccatcacccaggctggagtgcaatggtatgatctcggctcactgcaacttctgcctcccgggttcaagtgattctcctgcctcagcctcccgagcagctgggattacaagcgcccaccaccacaaccagataatttttgtatttttagtagagatggggtttcaccatgttggccaggctggtctcgaactcctgatctcaggtgatccaccaacctcggcctcccaaagtgctgggattacaggcgtgagccactgcgcccagcgttttcctcattgtttctaagctagggaagttaggaagcggagagagtgcacagagggaagccaagatgtttcatgtgcttggcggcagcttctgacctccattctgtggggagacggggtctctggagctcgctgctgggcttcgggggttgaccggaccccagcgcctcctggaacagcttaggacagtggaatttcagttgcctgcagggctgccactcagatgcccgcagggctgaggagctccttcctgctcctctaaaaggtggcccagtgagccaggtcttccatgttttaaagagaagctggaaagctgaattttatgtgaagtctcctagttttaagatgtcagttcaaatgtttgtaaacttctgtgtttctagtaagacacatcgtacctggtttggcccactacaatcaactgacagctttgttctggatcaatctaaagttgattgatgcatttttaaaagctgatgcttttatttctgccctccagctgtatatgtaagtcaaagaacaattaagatacaaaactgtgattcagtgttgcaacccacgtagaagagagttcagccttaaggtttaatttctttcatcttacaaaatagggcatggacagataacctcaccatgagtttgttcaacgttttcttatgaatatgaatacatcatcctttccataagacattttaaggcatccgcaggaaaatgtcatgttaaatatacatatccttcatgactacaaatgtgaaagtcatccctacgtttgtaccgtatacaacctgaacaactacacatggcaaccctaggtatgggtgtctctgtccagcccagtccagccctaggctgctttgcaagttacctgaattatctacttcttggaaaatataccttgtatttgcccagctctttgtagtccacaagtctctctctattcattggttaatttaattcttcatgacccagcaatacgttattatgcctattttatggataaagcaactaattctcagggaagctgagcaatctgtgtatgagattacagaagtagttacaggtaccgtgaaaggcaaatctgtgctctgacctaaggggtccctggagctgatacgctccaccctgcatgatttggtgcatcttccttatcctttgggcaggtgggtatcctcacccctaccccagcacctacagtccaccctgggggtaagctccagtccctcccagtgtgctgcctggggtgaccaggaatcagtgttccagcgagcagttaaaggcctggctgagccagctcacaggcgctgagcacaggtgctttcgccttccacgtgcatctcacacacggggctgggtgacacccaggaggcgagcataatcactacacacatgcctgtgacctcctgtcgcctgtgacctcctgtcacctgtgacgacctcatcatctaaaagctctaactcaaacttgtgcaggaatcttgaaattcttgaccatttttttaggatctcagatattaaaacaattttcaaactgccattagcctaaggggttgcaggtgatttttgaaggacagagtaggtaaagaaggaagtaccttccccacgccccgctttctttttatagtagaattctttactattttacagcagacattttgttcccatgattggaagacttttacaaccaggaacatagccagttttattttctttgttagttttattgagtagtttatcactgtatatttacatatgacattggttattggcagatataggctctccagatccctaacacaccaacacaaaatgagcttattagtcacggtgataacggaagccacgcagtgcctgggaggcaggagggcaaggttggaaccccctgaagattggagttgggataaagtggaacattccctgtcgaggggtcgaggggtcgaggggttgatgaggagtgagtgtggaccatgttgcaccagcccaagcttggtggaaacagccaggcaaggggtttaagtgagagattcaaagaatcttagagcacaaagttgctgctttccattgaagagctgatgggtctttctggaggtttccatgagaaatttgccccattccatttactggggctggagtctcctggaacgactttgccagtcacgtgaatggaaacggtggaagagcaaagtctctccttaattacacagggagctgtttgcggtgtgaggcacaggtggtttaagctttcatttctggttttgttttttttttttttgagacagagtctcactctgtcacccaggctggagtgcagtggcgcaatctctgctcactgcaacctctgcctgcaaggtttaaggattctcctccctcagcctcccgagtagctgggattacaggtgtgtaccaccatgcttggctaatttttgtatttttagtagacagggtgtcaccatgttggccaggctggtctcaagctcctgacctcaagtgatcaacccactttggccccccataagtgttaggattacaggcctgagccactgcacctggccgaagttcttgtttcttaaaggacagattggctaaagcagctacagtttccaaaaaccaatgggaaaaatgggcacttgtgtatttgaatctttaactatatatttataaatataaatatatatttaactatatttatatttatgtatacatactgtatatatgcctgtttgtacacgtatgtgtatacacatgcatacacacatacacatatatgtgcatagataattaacttgttctcagcatgttacatatcccaaaatctggaagtagaggtgctcaagtaggatgaactatgttgctccttgatcagttggtttgcttcctgaccagatgttgggagtgataacagcaggctcacagtgtagtgcttctttgtccctgaagaaatgaaagaggagtgacctagccatctgcgacgggcagccaccccagggtcgctcctgttcagcacggaagcttgtcgcccccatccctatggatctgcgtgtttcacggaccctttgctcagtccctctttagctacacttcatatttgtttctctgcaaacacagagattcaagggttttatgagccttcctttgggccagccattttcaggaaaaaacaaaacaaacagaaaacaggtgcagttccctaagtggactctctgactgggcagcggggttttgggactgggaggagatggaaggggcaggggctgggtaagtgcagcagcagaagcagtgcctggccgtcaaggctttggtagccccagagtgacccagagcctcaaaggcgtttaagcgtgagcaccgtgggagcatccgagattgcccggttggcttaacttattattattatttttttttgagacggagtcttgctctgttccccaggctggagtgcagtggcacaatctcggctcactgcaagctccgcctcccaggttcaagccattctcctgcctcagcctcccgagtagctgggactacaggcgcccgccaccacaccgggctaatttttttgtatttttagtagagatggggtttcaccatgttagccaggatggtctcgatctcctgacctcgtgatcctcctgcctcggcctcccaaagtgctgggattacaggcgtgagccaccacgcccagccggcttaacctatttttaaaaagttacttgcatgtattttagctggaaaaaagaaatgtacaaggatcaaaaagcttattttatgattataaagacttgtgaacggccgggcgcaatggctcacgcctgtaatcccagcactttgggaggccgaggcggccggatcacaaggagattgagaccatcctggctaacacggtgaaaccccgtctatactaaaaatacaaaaaattagcctggcgtggtggcaggcgcctgtagtcccagctactcgggaggctgaggcaggagaatggcttgagcctgggaggcggagcttgcagtgagctgagatcgcgccactgcactccagcctgtgcaacagagcaagactccgtctcaaaaaaaaaaaaaaaaaaaaaaaaaaaaaaaaagacttgtgaacaaaaccttgaattttaggtcttcaaaaacttattctaagtggaataatgtttctcacttttctccttttcaaagcaatgaaaaaaaatatgatcctgattatcttcacccctgaagagactcctctttgttgggtgggagtggaggagggcaaagtcctagccttaggggagggcttcagtgaggtccattctatcagagccacctttctggaaataaaattgcatttggcaacagatatactttattttctcttgacagacagtaggtaatgtgttctgaaacacataataaaaactgtactactcatttagaaacaaattttagtaaaatgttaaaaatataggagaggtagattattttctatgcaaatgaagctttaaaactagtttcctgggcttccaaccacactgacgtcttatcccccagaacacaggcatgtgccccttcctactctggacctggctggggtgggcagaagatgggagggggcaggagaaatcagaggtgcacattcaacatccatacattgaggaaggaagtcactcccctcttgaacccttgcaggatgcccttgccctgaggtcaaactaagctctttggatgagtctgcgatgcctccagggtctcatctatccctgccttctcctcaaacagcagggactttcaaacctttgaaagcagcagcctccattttgcagatgaaatcttgcacaccctcttcaaaatgggccccagccgaggtggataacagagggtgttcagattgctggtgcctgccctcccttggcctccaccctggccatcccctccccactgctatgggactgccctgccccatgccacaggcagagccaggtaccagggctcctgtcctggggagggagaagcggctcctccaagctccctctgccccacactggagcccctggctgcctttcctcatcccttcctagtgcagggaactcccaggccgtggagaactcccaagggacgagatgatgacaaagatgctctgcttgatttaacccagcaatcccattactgggtataaacccaaaggaatatcagtcattctataacaaagatacatgcacgtgtacgttcattgcagcactattcacaatagcaaagacatggaatcaacccaaatgcccatcaatgacagactggataaagaaaatgtgacacatatacaccatggaatactatgcagccataaaaaggaacaagatcatgtcctttgcagggacatagatggagctggaagccattatccttagcaaactgatgcaggaagagaaaaccaaatactgcatgttctcacttataagtgggagctggacaatgagaacacatggacacagggagaggaacaacacacactggggcctgttgtgaggtgggatgtggggagggagagcatcaggataaatagctaatgcatgctgggcttaatacctaggtggtagattgacaggtgcggcaaaccaccatgacacatttacctatgtaacaaatcttcacatcctgcacaggtaccccagaacttaaaataaaaatgaaaattaaaaaaaaaagattctctgcttgatggaactttagtcaagctcctgagcttttcttagggcccatatgtgcacttccttctaaaatccagctccagcaaagaaccctgttaagtcagtttgatgagaactccaccctcgatatctgatggggttcctcaccctccaccatccctcggatgatgtttgatcacctcagcctgttctcagcaagggcagtttagccagaatccccctcacccctgatgtttccccttagtgattttctatccacggaccccactctgctcctgggctatcagtccccacttgcctgggctgtagttagagtggagcccaatctctcccaccccagaaagtcccattgccatggtgcctggacctattgcgatggtcctgagtagtccacctttccatctttaacaagggtctttgaataactttttcaaccatggaaagcaggtgctgcctttctgggaaggatttggggcactgatcttatcttgtaggccctttttaaaaaagccttgtgacacttcacccatctttgacatatacagcctttcattcaaaatggtgctttttcaaaaagcccaggatgtgagcttgaaatgtaattctggaagctgacctttaatgaagtttgtttaatcataaactcttattgttggagctagtgctgcatgtcttaaaagctttaaagggtacggcaggtactcatatctgattagcatctgcacttcaccaggtggccatttgttgtctaaaaatgttgacattcaacaatgtaatgaaaatgttggtcctggatgataaaaaaagtttttcacacagcaaggcagaggacagtgcactctgttgtggggcgtatgtctccctgcaccactaactagggcaggggtgaggaagtggtgggccacacctctgcctggaagacgtggtttttcccaggtacttcagaggctcttttcaatgtttgcaattgtagggggctcagaattcgccaggatttaacaggactggaggaggccaaattcactaggatttaataggactggaggagaccagaatgggctccccagaggcctcaaacccccattcctttctgtcacccagagtgacatataagcctcctccccacctttttcacgggggaagttcttattgcaatgatcctgtgtctccccatcattgtgaatggcctgtgttcggacctgttagagttatgacagaggccccagagccacctccagaagacctgcctacccagtgagaggacttctcagcagctggtgacccatcctagacacaggggattccccgtggagttgacagcagtgaggtgggaggagaaggaggcctacagacagggaagcaggagacgaagcagaccaggtgtctcaccctcagctgctgctgcactccccatgctcttccaaacacccttccccctgcaactgcctccctctgggttctggagctaagagagcctgcaggacttggggcccctggggacagaatgggagcagaacagccccacaaacagggttcccttcccaaatcctgaccccaggaaccccagctcctgattccaactcagctgcccatctcctaggggctgtgtggtgcagccaagtcaagtgccctctctgaaccccagcattctcagctgtaaaaaggggaaatcagtgtgtccatcttgcactgaggtaatgtaaactcgagtgtggtgactggcaaagcaaatattcagtaaaaggtaattgtttttatagcatacacagtgagccttggggctgagccttataacttggttcaaccatgaaaaacaacaaatattaaacaaccttttccttgtttgaacaactggcatctggaattcatctgaagaatttgctgaaagcttggtggttgtatgaagagagccatgaaagtctttgctatgatatgaatgtgtccccctaaaagcatgtgttggaaacgtaatccctgatggaacaatattgggagatggggcctaatgggaggtgtttaggtcatgaggcttaactcttaggaatggattaatgatgattagagggcttgagggtttgaggctatgtgttccagctcttgctgtctcgcctcgtgatgccttctgccatgttatgatgcagcaaggagaccctcgccagatgcagcccctcgtcttggacttcccagcctctagaaccatgagcctaataaacttctattgttaataagttacccagtctgtggtattctgtaacagcagcacgaaacagactaagacagtctttatgtttttctaaacaagggatctcattcatcccttgaggacatggccaaaggtcctcagcacaccagagatttgcttcacctggctcttaaaagtgctgatcattccatctatagcattctacacaccctgtctttacaaggaactcgtgaattctctgtcttgccttctgactacgagtacttgtgggaatcttagagctggttcacatcaaaactaaagtacagacactgggacaaacactgggacaaatattgttttattgctgacatcatgaatagctgcattattccttttcaggtacacacattttaaaatccattaatgatgaatcaaatgtcactttttttttttttgaggcagagtttcactcttgttgcccaggtgggagtgcaatgatgtgatctcggctcactgcaatctcccacctcctgggttcaagcgattctccggcctcagccttccaagtagctgggattacaggcacccatcaccatgcccagctaattttttgtatttttagtagaaacggggtttcactatgttggcctggctggtcttgaactcctgacctcaggcaatctaccggccttggcctctcaaagtgctgcgattacaggcgtgagccaccatgcctggtcaaatgtctgttaagaaacagattattgccaatactattttgcccagttccccagtttgtacccccacgcccattgaatctccattcattcccactaggggaaatcaccctactgaattttatgtttattaatttctttccctttttcacagatttagtatctaggcatatatttctaactatacataatttagctttggttgtttatgagctttatgcaaatgagatctgcaactggttttcttgcctagtactttgcttctgagagttatccgtgatggatacaatggtagttcaccatctttcattgttggagggcattgtgtcacatgcacacaccactgcacatttatctttcctcttgtcagtaggaactgacagaatttcctatcagtatttgttttctttttctccaggttttgcagtagaaatagtgcttctctgaacatgtgaaggtttttggtgtgttgcaagagtttctttagggtgcatacttagcagcgggatttccgggtgaaagattttcacatcttcaacattacagcatgatgctgaaaaggttttcaaagtggttgtatcaatttatatgctcatctcattccctctgcccccagcagatccccaattttggccatacctaatattgcgcaattttaatttttgccagtttggtgtgtataaaatggtaactcatttctaaaattttggtaaaatatacataacataaaatttatgattttaccatttttcagtgagtggcattaagtacattcacactgtcatgcaatcatctattttcaccgccatctattttcagaatgttctcatcttcccaaactgaaattctctacccattaaacactaactcccaacccttcaccttcgccccttagcccctggcacctgccattctactttgcgtctttatgactactttggacttctctagggacctcatatcagtggaatcatacagtacttgtctttttgtaactggcatatttcactgagcatagtgtcctcaaggttcctccatgctgagcactcatttggttttgtgttccacttgctataatgatgtggtgtgtgcgtgtttgtgtgtgtgtgtgtgtgtgtgtgtgtgtgtttaaaagggattgcttagaggatttggccttttgggtcaaactgtgggatctgactaagaggtctctcaatggctcttatctttgcatctgatggcatttgggaagggaaggaggttataaaatgaggaagaacaaggacaagctggaaccaatgagcatgagctggagcccacaaggccagaccattgcctataacagtgacaagagggtcaagttggggctggggcatgggctcatcatcttgaacatacacacctggccctggaatcagacgcgctgatggaagatccaggggaaggcagagcagttgcagatttaggcattcttctttgctttattttgcttggtttcattaagtcatctccttctcgctcctctcatcccattttttaattatttgggtatggatgctaatcatattatatatatatatatgtgtgtgtgtgtatatatatatatatatgtatgtatatatatatatagtcttttttccaccagaagaatacaatgattaaaaggctttaattgtgttcactttaattgtgttcatcgcactactggctttcatggtatggttttccaatacttcagttccatctttgtgttgtttttgttgttgctcttttacaagttaaatattactactggagtttctctatgctgtaaatattagcttagatttacccacattgtcaggattttattggttcaccattttctcttgcatgtcagactttctcctgggattattttcctgcttcctgagcaatatcctttagaagtttttttgttgtggtcaacactgttttgttttgcctataaatgtattttccctctctcaaaggatattttgcaggatataaaattctatgtagcctggtgtggtggctcacgcctgtaatccaaacatttgggaggctgaggtgggcagatcatggaggtcaggagttcgagaccagcctggccaatatggtgaaaccctgtctccactaaaaatacaaaaataagccgggcgtggtggcaggcacctgtaatctcagctactaagcaggctgaggcaggagaatgccttgaaccgaggaggcagaggctgcagtgagctgagatcaagccactgcacttgagcctgggtgacagagcgagactctgtctcaaacaaccaaacaaaattctatgttgacagccacttttcctgaagactttaaatattttattccactatattctagcttcaatctggatgttgtcttttgttttataatgctttttatttctatttatttatttattttaagatggagtatcgccgtgttgcccaggatggagtgcagtggcatgatctcagctcattgtagcctccgcctcctgggttcaagtgattcttgtgcctcagcctcctgagtagctgggattacaggtgttcaccatcacgccaggcccataatgctttttaggtcttctcttcacttcagggattctgaaatttcactaggatgtgtttctacaggttcctctttttttctgcttgggatttgttgtgcttcaataatctcagactttctgacttttatcaattttggaaaattcctgactatttattattttaaatattgattctgccctattatctcaatgatcactttccaaaaaactaatcagacacattttagatttttttactctattttctataccacttagtttttctcatattaaaaaaaaaaacaactttgtcttcctaggtgaattttgaataatttcttctggtctatattccatgtcactgattccatcttcagctatcgaaaactttcagctttttacttctagaagtcctctttagtttttttctctgcaattctgccaggtaattttaaacaatcctgattcccctgaggacccatcctaccaccctttgctctagacctgtaactaaactcaagttataacaggctcctaaaggtgaggtccaaagtgtgacccataaagaaatgtgctgcattccaaaagaactacttgagttttctaatttatacaaacaggaatccagggaacatgtgtggaaatggatattaaaggtatggataatggtggaaggaacacaactttggatcaaaccaaattcattgaaatgggcttgttaagcaaggactctgcagtgaatgttgcagctcagggagttagagagggctctaacagtttggtcggttggctgaaacatggatcaaaaggtgacccacagccagcgaactggaaatgctggacttgccttggtttaacatagagaaaaggattcaaatacttaggaagattgaaatgtgagggtggatttgttatttaacacctgcttacccactgtgggaggggccagtgtatcttacttttcaccagtactttgataaataagtttgtaagaggagcctcagcatcgtaaagagctctgtgattactctttggtctaggccagactttacgtgagaaatgcaatcactaaattgggaaacctcagtgcaataagagtagatggatcccaaggtagcaggggccaagtggaagcactcaactgccaaaggcaaggtgggcatggttactctaatggacagtgggtataaaacaaaaatcagaatagtccgactcatgtggatctatggcatgaactattcatggtgtcttgagacatgaactagatgggaagcctactaaacccttacttgatttgtatgagcagacaagttctagggcaagtgagcaggcctaacctgaatcatcaaaacggagactcatgcccctcaatcaattcccaggcttgagccagtttacaacccagaaccctttgagtgaagggaagactgggtccccttgaggaaggatcccaggacactattgaaaatggatcctgttagcctttctcccatcctttcccaaaggaaagggacctctggccttttaccagagtgactgtgcattgtgggaaaggtaagaatcagaccttttggagatgactggacactgcgtctaaactggcattgattccaggagactaaaaatgtctgtgtggcccttcaatcagagtaggggcttatggaggacaggtgatgaaaggagttttagcccatgtccagcttacagtgggtccattggttctcaaacccatcctatggttatttccttgttccagatgcataattggaatagatatccacagcagctggcagaatccccatttgggtcctcgactcatggaatgagggccatcatagctggaaacaccaagtggaagtcaccagaactgcctctacctaggaaaatagtaaatctaaaacaatattgcatccctgcagggattgcagagattagtgccaccatcaagaacctgaaagacacaagtgtggtgattcccaccacatccccattcaaccctcctgtttggcctgtgcagaagacagatggatcttggaaaatgacagtggattattgtaggcttaaccagctggtgactccaatggcagctgctgtatcagtttgagccaatgaacacatctactggtacctggcatgcagctgttcacctggcaaacaccattttcctgtccatgagacccaccagaagcagttggctttcagctggcaaggctggcaatacgccttcgctgtcctacctcaagggtctatcatctctccagtcctatgccatgattttgtttgcagggaacttcattgcatttcttttccacaaggtattgaatggtgtattaccctgatgacattatggtgattggccctagtgagtgagaagtagcaactactctagatttattggtaagatgtttgcatgtcagagggtgggaaataaatctgaaaaatttcaggggccttctaccttagtgaaatttctaggggtccagtggtgtggggcctattgagttgccttttctaaggtgaaggataagttgctgcatccggcccctcctacaaccaaaacagaggcacaatgcttagagggcgtctttggattttggaggcaacacagttggatgtgttactctgggccacttactgagtgacctgaaaagatgctagttttgagtgggccccagaacaggaaaaggctttacaacacgccaggctgctgtgcaagctgctctgacacctgggccataggacccagcagatccaatggtgcctgaagtttcagtgacagagagagatgtgatatggagctgtttgcaggccctggaggtgaattgtagcacaggccctgaggatttgaagcaaagccttgccatcctccacagataaatactttccttttgagaaatagctcttagccagctaccaggccttagtagagatggaagacttgaccatgggccaacaagttaccatgtgacctgagctcccgtcgtggactggatgttacctgccccaccacgtcataaagctgaggatgcacagcagcactccatcgtcaaatggaagtgtctatatgtggtcaggcctgatcaggtcctgaaagcttaagtagattacataaagaagtgacccaatgttcatggtctccactcctgctacactgccttctctgcccccctgcctgcacccatggccacatgggaagttccctatgatcaggtgacagagaaagagaagacccaggcctggtttacagacggttcagcaccatgtgctggcaccacccagaagtacccagctgcagcaccacagcccttttctgggacaccccagtaggattgtggtgaagggaaatcttcccagtgggaagaacgtagggcagtgcacctgcttgtgcactttgcttcgaaggagaaatggccagacatgcaattatatatggattcatgggctgtaatcaatgttgtggctggatagtcagggacttggaagaaacatgataggaaaattggtggtaaatttgggacagaggtatgtagacagacttctctgagtgggcaaaggatgtgaggatatttctgtcccatgtgaatggccaccaaaggatgacctcagcaggagaggactttttttttttttttgagatggagtcttgctctatcgcccaggctggagtgcaatggcatgatctcagctcactgcaacctccacctcgcaggttcaagtgattcttccggctcagcctcccgagtaactgggattataggcacgtgccaccatgcctggctaatttttgtatttttagtagagacggggtttcaccatgtcagtcaggctggtcttgaactcctgaccttgtgatccaccgaccttggactcccaaagtgctgggattacaggtgtgagccactgcacccggccaggagaagactttagtcataaagtggggccggggtggattgcctgagctcagaagttcgagaccagccttggcaacacagtgaaaccccgtctctactataatacaaaaaattagctgagcatggcagcaggtgcccgtaatcccagctactcaggaggctgagacaggagaatcacttgaacctgggaggcggaggttgcagtgagccgagattgtgccactgcactccagcctgggtgacagagtgagactccgtctccaaaaacaaacaaaaaaatcaagtggatgagatgacccattctgtagataccagtcagcctttccccagccactcctgtcatcacccaatgggctcatggacaaagtggcctcggtggcagggatggagattatgcatgggctcagcaacatggactcctactgaacaaggccaaactggctacagccacaactgagtgcccatctgccagcagcagagaccagcaccaaggctctgatatggcacggttccccagatgatcaggcagcaacctggtgtcaggtggattacattggaccaccttcagtatggaaggggcagcattttgtccttactggaataggcagtctggatacagatttgtcttccctgcacacagcgcttctggtggaactcacagaatgcctcatccaccatcatggtattccacatagcattgcttttgaccaaggaactgacttctcaaagaagcatggcaatgggcttatgctcatggaatcgactgatcttcccatattccccacccccatgaagcagctgacttgatagaatagtggaatcgccttttgaagatgcagttacagtgctggctaggggacaatgctctgcaggctggggcaaggttctccagaaagctgtgtatgctccaaatcagcatccaatatgcggtgctgtttctcccatagccaggattcactggtccaggaatcaaggggtggaaatgggagtggcaccacgcactattactccaagtggcccactagcaaaattttcgcttgctgtttctgtgactttacgctctgctgacctagaggtcttagttccggagggaggaatgctgccaccaggagacacaacaatgattcaattaaactagaatttacgactgccacctggccacgctgagctccacatgcctctgaatcaaaaggcaaagagagagttatgcattggctggggagacccatctggactaccaaggagaagctatagactacttctactccaccaggaaggtaaggaagagtgtgtctggaatacaacgattccttagggcatcttttagttttaccatgcttgtgattaaggtcaatggaaaactacaacacaatccaggcagggctattaatggcccagacccttgaggaatgaaggtttgtatcactccatcaggttaagaaccatgaccagctgtcatgcttcccgaaggcagagggaacgcagagtgggtagtggaagaagacagttacaaacaccagctattgcccatgcaacctgttataaagcattagattgtcacgagtattttctcattatttttttctaaatacatttgtgcacatatttgtatatacagtatatatctctgttgtcttttctctcatattcctttattacataacttaaggcatattgactttatatcattgtattaagtattgttaattttacattatggtatttaagttatggaataccaaggagaagtgtaaacactggagaattttacatccacttctggggaagggcttagtgcattttttggttgtatgcagaagagttttatcacattaggcaaaattattactttgctattgtctttagagataaagtatggtgtaaggagatgtgtaggtgtgaagtcgacaaggggtcaacttatggtggcatatatattcatgcttagataaaactaaggtcacattctgtcatacaagctggagtacagtggcacaatcaaagctcactgcagcctcaaactcctgggctcaactgatcctctcactttagcctcccaagtaccttgggctacgggtgcgcaccaccacacttggctaatttttaataaactttttgtagaggcaggatcttgctatggtgtccaggctagtctcaaactcctgggctcaagagatcctcccacttcagccttctaaatggtgggattacaggtgggagccactgcatccagccatggttaattttatgtgtcaagctgacttggtcatgggatgcccaggtaactggttaaacattatttctgggtgtctgcgtgtgagggtgtttttggaagagattaatgtttgaaaagactgtgtaatgctgattgccttcaatttgggcaatcggttgagagcctgaatagaacagaaaaggggaggaaggttgaatttgctctctgcctgactgtgtgagctggactttgatcctctcctgccctcagcactcctggttctcaggccttcagacctggactggaatctgttccatctgctctctagttctctggctctcaggactttgaaagctacaacaccagctttcctgggtctccagtctgtagatggcagattgtagagcttctcaccctccataattgtatgagtcaatttcttatagtaaatctttatatatattataaataatatttattacatataagctgtgtataatatatatcatatctgtattatattatgcatataaaatacatgtttatgtatatatttatatgtatttataatatataagatatttataatatttataaataatatatagaaatatagatgtgtgtatatacatgtgtgtgcatatgtatatgtgtgtatatatttgtatttctcctattgtttctgtttctctggagaaccctgattattaatataaaaggaaaaataaatggtgaatgaacaaccactccaagaggcctgagtctgcggcagcacttactccctggtttctgggtggaattagtaggcaccaaacacactgtcaagacagaaataagtgagttgccgctgaaagacaactgcacctgccctatgtgctggagagggtctttgagggtttcccactggggcagagcgcagggcagtgtgggggatggggagggctggggcatattggggacaatccctgttgtgggtgccaccagcagaccacaaaaggtgccaaaggagggagtgagagggaagggtttactaggaaagtcctgccccacaggaggcttccgggagagcttcccaggaagggagcagtgagccaaggcagcctgggatgggactgaatggggcttttttctgcttccacctcattttaaagcaaatcatgttgatttgtatattatgcaggggaggagaaaacatgcttcccctctacccttctagttcgttcagctagtctacaaattaaattggcatcaaatagatgaacaggagaaaagctgttttaatgtatgtactcacagatgggaatcccacaagaatatgagacttaaagaacaggccaggtgagtgaggggtccagtgcgagggctcacacctgtaatcccagcactttgggaggccaaggcaggtggatcgcttgagcccagattggagaccagtctgggcaacatagggagacccccatctctacaaaaaattaaattagctgggcgtggtggcacacgcctctagtcccagctactcgggaggctgaggtgggaggattacttgtgccctgggaggttgaagctgccatgagccatgattgagccactgcactccaacctgggcaacagagtgagaccccttctgggggaaaaaaaaacacacgaaaaaaaaaaggtgcagcagcccgatgattgaggcttatctgtcactctgagtgacagaaagaaatgggggtttgaggcttctggggagcggtggaggagtgaggggagcgtgaggagaggaggtgtctggtgaacgcaggttgccgtgtgaggcagataaaagtttcccaggtgataaaagttgtccgggaacagctctcttcctggtacagatctgctgactaacaaacatttcctttataggtgcaaatttcctttacaaaagggcattttctcagaggtactctggtgtctgcagttcctcaacataaccagttccaaatcatcaatgtgccaaagaggactatgttggggtagcagattctggtctcctccagtcctacttggggtgatgaattctggtctacggtcctattaaattctggtgaattctgagcccccacaattgcaaacattagaaagaacctctcaagtgcccgggaacagccacgtcttcctggctgaggtgtgtcccaccacttcctcactcccgccctggccggtggtgccgagagacctgggaccatccgggggagcactttccaccggacgctggtgggggccaagaaatgccagcctaggcggactggggagggtcttgggcgtccggcgctgtgtccccgccactcgtgcttgggccagcagtccccaaggcctaccctgggtccttgcccagaggctacagtgggttccccggaggccaagacggggccggccgcctacaggagctcgtgaggtagcagctccgggggctcacccaggactccaggagcgctccccagaatccccttccttaacccaaactcgagccctcgggcagcgctgcgccgcggaccggagaggggcaggttggccgctgtggccgggcccgggaagcgccccagagtcccttatgggtccctccgcagccggggttgagccaggcagggaacccgtcccggacttcccttgggaaacgcctcctcccgccgcccccgcccccgcccgcccagggtgacccgcgacccgcttgggggtgtcgccctggaccctgggacaccgcctcctgagattaaagcgagagccagggcgggccgggccgagtaggcgcgagctaagcaggaggcggaggcggaggcggagggcgaggggcggggagcgccgcctggagcgcggcaggtgagcggcgccggtaccagggtcccggctcggggtccgggctggggaggggaacctgggcgcctgggacccgccgatgccccctgccccgcccggaggtgaaagcgggtgtgaggagcgcggcgcggcaggtgagtgcgcccgagggtcgagcgctggggccagccgggcagggcgcctcccggggtgctgggagagtgctgggcgcctgggaccccttgcgcacggccgagagccctcgccgcccctgttggcttggcatcgcgaggttggggcaggtggtcctgcgagtccctagccagttggtggaagagagtcccccggggtccccaaagctggctcctagtccgcctgccctccacggcccccgcctgggagcaccggtgcgccttttctctttggggaggaggactgggagtgctgtcggttggcttctttgtttgggggaaatctctgcagtcccgcagtgttacctgaactccttctgcttcttggttccctactgaggtagggagaaactggaaactcgctgagatgccgggaacgatacggccggcgcggcggggaccgctgggccaggctgctggagggcccccgggcgaggtgcgaacggccagtcagtctcggggagggactgctcgcgactcaggccccgttgcggcgacccgctggcggcgatcagggccggggcctcctggacacccggcaccggcaggaacccgcccgggaggagccggtctggctcctccgcttgcgctccgtgccgggttggggggaaggcggggcacctgggcgcttcggtccacctcatcctgtcctgcccggctcggcacagtggcaccctgagtggtcaagtgctccagtctggcagtgggcgctctgctcgagcacgggtccagctgaaaaactgccccatgtccagaaagtttgtgcgccgagagccctgagcgcttgtggcagaggagggccttcgcccgctccgccgtagagcacagcgcggtggccctgaatcctgttcagaacgccctggtggcagccctaatcacgaggaatcctggtggcttgtttgggaaggaaaggatagcacggcggcccgaggtgagccctgtgggcagggagcacccagggctcgccttcgaggctgcgcagcccttccctccgtgcgaacctgtgcagtggtcccgcgggaaagatgagcgcatcgcgcccaaggcaatgcctgacctcacggagctcccagccgcgagaacctcccgaatcatggaaaattacaaaggctacgcagcccagttacaaggcatttggaaaacctaaagtgagactaagtttgttgacctgtcccaggagatctgggaaggtactccaggaagtggggatgcagccagcctcccctgaaggaaggatgggggttgggagtgtggcagggagagtttaccagcgcaaagggccttggggacgcaagtagctaagtcagtcctggctcctgagctgctgctgtgaagggaggacctggtgggctaggtaaccgggagctcccccagaaagtcactggaggttgctcaggacttccccacctttactgagtgcttttgaagaagtaggacctgccctgctccgctacagaactactggacaggtgaggttagaatgaaacctagcaacaccctcgggtaaggacacactaggctggagagttcggggtgcaacctacgggctgagacctctgcctggagatggccatctacacctcggcctctggttatttttaattatcagctggtgagctggctgggcttttgttctctgcttggacatttgtttggtccccagcagcttcccttattcccaccagccaaggacaaccttctaacaacaagcttgtgctgttgctggagcctcaggcagggcctcccaggttgctaggtgctggcctgcctggcaccgttggccactctatcttgaactcaagtcaccttaattgtaggagtatatttggctgcactggcattataataataaccacagacattgatgtggcacttttttcagccaggcatcattgcaaaccctttataatgtacttaactcaattgtaaggaaactggggaagagaggttgggaagcttgtccaagatcttgtaacctgtaaggggcagaactggggataaacatggcctgtctggctccataggtcagtgcttccagtgtcgggctctgagttggagacacaggatgcttagaaggggctttagtgacaatcggcacagtacggattccttttgatccttccctgggttctccctccaggatgttggaatgttaccagcaagtggaggaaaggagggaaggaagctggaaacaaggcgcccggaatcctgattgaaaagggcttgttcctgggccaggctctggttctccccgacctgaaagagcccagcccctgcccacagccctacctgggctccgtgctgctccctctagcagtatgacatggccagagtgcctggaactctgaaagggggcctgcggagggctgacctcctaggccatgggggcattgagtgacaagacgctggtgcaaatgtcctgtaggtgaaaaggtagatgcgtgcagtaccttatgccagtaaccaccaccaccacgatcatcatcatccgagtgtgttgtccccctaccaggaaatgtaaaccaaaagtctggctgataactcttacccttttccacctgaatctgcggcaagattccctaggggatcttcgtaataatatgggatcattgccttggtcccaattattacatcagactctgagaatggggcccaggcatcttatttatttatttatttttctaagccctcttgaaaattctgggtttggggagcactgatcagatctaagccttggacattgaggtagaaaggaaaggtgaatggtcaatggagtgcttgttcagttttggttgctgaagacttggaaagtggccttgctagtggggagagtgagggcagggagagctccctgtggggaaccagagagcccaggagcattgaaggcccaggtgcatttctgctctctggtccctcctgctctgcactccctgagtgtccctcatcccacagtcaccaggcctttgctactcttccccgcccctccttactttccaggacacctgccaggggatcctccaatatgggatgcactgcgtggcctcaggattggggtgcaggagcattatgtacctgagagctgaggcctgtatggagtcagcctttgtggggcccctcctggccctaagggtgatttgggaagccctgacttgcaagcaccaggggtatgggcctgggtgtgaagaagggggcttatgatgtccccatggccattgaccaccttggccccaccgagcctgtggacacccaaggaggagcaaaagggggatctgtgacagggtagcagcttggttgagcacacaggcagctcttcagcatgacctagaacagaggctgggctccaggaggaggcagagcctgatctgggacttggttattcctggttgctgagcaatggtcaggagagaggaactgaatgagtggaaatgcgctggttgggagtcgaggctggttttctggcaggggtgtgggtggttacttttgttgtaaacagagtgaagtttgagagggcaggaaactcgaagacaggcttttcatcctcctggaggtgagtctgggagagggaggtgagggctctgacatctatgtgtggatggcgctgagccattgggcatccatggcaggagggcaggaggagtttagggcacagagttgtggtaagaaagcaggaagtgtttgaagggcaccttggcttgtggttgtggcagcagaagtctggaagttcactcaagggcagactaggtggaaaaatcggggctgtcaagtgggactcagaatgagaggttgtgacaattggatttgttagaaaaatattttcaagcgaggtctgacttggcagatggaactaagctgaggctttttattattgcttgtttgtacgaggtgcacaatgcagtgtcaaattccctttaaggccattgctttccaaggggctgtcctggcggggcactcagcctgaccccactgcagtatagcccaggggtcatgggagaccatgctttctagggacgatgggcttggagttctttgtgcaagatactgataacagagaatttgctgacattttcaagttcactggtgatgatgcatttataaggagttgggagtaatatgaaagatcactatgtctggtcttgatgctcaagcctaattctgttctggaatatgttggagaaatgatcctccagtcttgaaacatacatttttaggtttgaggaattcggtacattctaaggtagctccaggccatatgtgaactttctaattgttggaaccttgatttccccagatagaatccaagcctgctcttctggaaattctgatcatgattctggtattgtcctttggatgtatgcagaataaactgaattccttttccacatagccggctcttacgtgttggaagataaaccttatctgccatcattatgttattattgagtgctcaccatgggttgggcactgagctacggccttgctttctcacttaatccctgcaacaaccctatttctgtatcatccccattttacagattgacttggacaagttctttaagcctcagccagtggcttgtgtgtggtgttgaagtctccgcctggagtgacctgagggcctctgccgcctgcctgcctgtcatgccaggttgcactcagcttgaggcacctggactcctgggaggtcacccactgtcctgacttgggctgctggtgttgtctgggtgtgggcatcttatcgccctctgctaaatttcatcttactcatttggcctttggaactcaaaaaatatatattttttcctgcaaattgcattgtatttcaaatttacatttccgatcgtctgttgttggtatataaaaacacatagatttttatattgatcttgtatccctcaactttgccaaacatgcttattaatttttccccaatagtttttggggtacaggtggtaagaactccataaaaacatttaaatactgtctttgtaagctacaaagtgagatttaaaaaacaaacagaaagagagagaaccagacctgatatctgccctaaaaagtttgtaatctctttgggacaatgagtcattcacaggaaaagaaacttggatgatgcaggcaatacctctcctaaggtgatctttctgtttctcgctcaacctttctctctcagtagaactcttgtgccaatcattgtgtatgcaatttacctgattatacataaacaagtttctgctgaacagccactgaaatccactgttggctaactcatttagtcatgcattctatccttaggaggatagaacatctcgttgtataatgtgatattagtgcggttattttggcataaagggctctttttgatgatttggtcattggctgggatgtgtccgtggatggtggtggtggtgctgtctggattttgaagaaggggcactgagtctgaggctgtctgttccctctcacacctccagcaactcgaaccgtaccagtcacaggtgggggcttcgagaaggagaaggtgtgtgcacaatggtgcacggtgaggtcagtggagacttcattgcagagaatacccctggatcttgggtgggagtcagtgtctacaagcctaacttcattcgcgttggcttggttgtttggaaagtaagtctccagtaaacgtgtcctgagatctccagaggagagaaactaggagaaaagattcttgttttggcagtaacttcatcatgtcatgggatgcggatacgatgccacagcatcgtcctgctgcatggtggccaggcaggtgactcatgggctgactcagctctcagtccaggatggaccaaaacagtgcgaggacagctgtgtgccattgtgagattcaagtgggtgacactgtctgtattgaaggaagagctccctgccagccaggaatggagcctgagtgccacccactgttgctctttcacacttaaaggaaaatttccccaagtgctcatggtggctggctttccagaattgagagccatcatcccggtcctttaaatgacaggagcaagcattcgctaaacagcattgtctctcgccatctactttacgtcttgctcctttcagaaatgagttaatgcgatgtacaagcttgtgtgaatgaggaaatgcctgttttgaagatgaacaggactgaatgtgatttcctggtcttttcgggacagcagtgcttccccttgcagatctaatgtcagagcgggacattcccccccttgttttattttcaattggagaatgttgttgttgtttcttttttttttttttttttttttttttttgagacagagtctctctctgtcacccaggctggagtgcagtggcctaatcttggctgactgcaacctctgcctcccaggttcaagtgattctcctgcctcagcctcccaagtagctgggattacaggcacccaccatcatacccagctaatttttgtatttttagtagagatggggtttcactatgttggccaggctggtcttgaactcctgacctcaggtgatctgcccgccttggcctcccaaagtgctggaattataggcaggagccgccgtgcccggcccagctggagaatgttactggcagcatcactctggtcttccattccaaagtccatggtaactgacttgggcacacggaatatttttgtttatcatgttctgattgctggaagagataggattatcctgtgactgcctctgggtcccatggcttttatttgacaattaatggtggtggctcccggtgttccttccttccctggcttccttgttagggatcgtgaatgaatagcaagtgtgggttttgagtattgattcttcactcctttcagagggcttctgagctgggagagctgccaatgggatcgaattttcacttcctgaaacttcaaccaaacctgtaactggggagataggacagccgagaaaccagaggcatgaggatgtgtttggttaggcaggactctttgaaagcaatcttaggatggtactgagttctgtcctgcttatgagacaagaatgcgggatttattgtgttgtcaagcctgaggatcctctctcttcacaaagcagacataggcaaggtctgttaagatgtggctaaaaggcttaaacgtttttgatacattttaaatggtgatccttcccacctgtacattagtcactttcctttccttatacccaggaaggtgtgaactttagttttaatcctagaaaaagtcccaaagctacaacatgacctggttcttgtatttttatctgtaattgaagagtaaataaatgattggtgcatgtttgttgtaacctgttgggtgaggtttctcgagactaaaaagccatatactcattttcattcatggcaggctgttggggttttatagtttaatgattcagcaaccagttctgcttaggacacaggaaagcgatggtgtactgaagccggccccactctacttggctccgtggtgggcttcatgttggtagcctgggaatacttaccgaaggcaaacctgcgaatcaagacagccctcttttccttcagcaggttgttaaatgtttatcagctttataattcctcttatttaatggaaagttatatagcactcattttatgctaagcatgaagcacttcattagtattaactcatggaatgccctggaggtaggtgttactattatctgcatttgcagatggggaaactgaggcacagaaccttcaatagcttcctccaggtcatggagagtgagtggctgagcctgagtttggatctagagtctagtctcagaggtcaggggctgaaccgctgcccagtgctgcctgctgctgtttgagcacctgctttgtgccagcaactgggaaatattcttctgtggccatgtcacagacagtggacactggtctggccaggtccgaagcccagagcctcctccaggttcttgttccctcattgggaacatggtcttgtggacggataatcttgaaccccgtttcttaaaatattctttggtcatttaaagccaagcgggaaggggtggaaaaaagccctttatttgctcaggaaggtgcatgttaaagaaaaaaaaatcgtccaatgagacttgttaaaatggtgaagcgaactttattcaggaccacggaggcaggtacagggaccacagccagcagattttgcagtgggaagaagagactgggatccgcttgagtacagtatgggcaagtgggagttaatttataaccaaggatcagggtggggttggtgggtggaaaaatcacaaagagaaaacatcaagggtaagggggattctggctaaaccaaccaaacaggattcttgctgaagacaggctgggtgatcagacatcacctgtggcacggtggaggctgaggaacccgatcagatatccagagtgatcagataccgagggtgggaggttctggctaaactgactgagcaaggttttttgctaaaactggattttacaaggaaatgcacagatggcctagaaggttcaggagcttgatataagtttgatcaagcgaagaatctttgtccatggagagtgatgtcagaatgcggctttactatacagcatttcgtgttgacggcatctctagctattattgttaactgttcacaaaggacaacaagcaaaatggcccacagctttcttttcattactgctaatcttagcagtggtcaaaatggttggctctgaatttctttcttttttgggtttggggtagtaaatggagtgactgtggacatgttttatggattattttaagcgtatgtatctattaaaaattgagagggcccacatggcctgctttaaaaagtcaactgtgagctgtatttggtgctgagccctgaaccacccgctgggcagtgggtggctactggcagtgcctgtggacgttctcggggaaagacggtctgattgcacctgctcttcctcagttcctagtactgtgaggcactctttccccactctcccacaaccctcagcttaacacaactgtggtgattgctttgtccgttttcccatgaggaccctgagatttcaacaaggttcagtaactcacacatcgacacttccagggagctgtgttgccaggaactggcccaggtctttccctcctgggcccatcttgtccttaatctctgctgacattgatgggtttagttaccttgtcgtgtttcttcagtgttttatgccatacagtctcccttgagtagatgttctgtataggggatatcacagcttcctggtgagaactgggttaagtccagcaggatgcctgggcttagtggcactggagttgtgggtggccttgagccccaggcagtcccctgagagcccttcccgatggatgtttgagtcactgagtgtgttccttcttctttctggtcaggctgtcctggccgctgcacttacaattgcaccccatcctcctacccactctgatcccagaggagagtgcttctgctgtaacctctaaggcacaagtgggtcccaaagtccttaaatatggagggatgtggggaagcagtggtgaagatgcaggccaaaggtcagcaggcaacactggtctttgttgtaggtaaccttcatctagagattcttctagttctttccagatttatcttctaaaaactaactggtatggaaatattacagtcctgtaattctttcttctaggtcatattgaacattccagatacctatcattactcgatgctgttgataacagcaagatggctttgaactcagtaagtggttaattattaccttcctggccttttctttgttcccttgtcccttctgttattcccaacattgtttggggtcagcaattgcaagggctatttgtagggaacgccgggccacgctgatgctgttcaaggcaccctctagaaagagtgagtcaggtgcgcagccacacagctgcccaggtgagtcgcaagagccatggctgttgggtacacgtgggtgatatgcattctcaccttgacctcatcccttcctgctttgcagggcagggggcagggacaaggagtggggacagatgaggcaggatggcgataacaggggtatgttccagggaagagacccacgtgggatcccatcgatgcccaactgaaggactaggaaaagtcataactgcatgaggcatgggcgggccttccctctccctggagcccactccctttggagacaaatgtggctaatctctgctccccattgtaactggcccgtttgccttatacctaaaataagtgcatttagtaaagagttttaaacacttcctagattctatatctggaaaatagaccttgttttcccctttatttgttactgatattcattttttactgggtctgtgtttaatttcaagtccactgctcaggaattttcagggacaaacctgcttgctagtggatggcaagttcttagatggctgagattgcagcctctgactccctcatttagatgagagattaccttgtgttttccctctgtgtgctgctctggttcagagctgtaatcttcggacttttgaaggacagcattagtgagttattaagtggaggtgaactctgcgggccttgtttggctcattccattgtaatcaacttccctggaggcctcatttaaagttctaagagctatgctgcctctgctcagaacacctgtccattgagtacaaacttgctgtcattctctgaggtcaataagagacaaggggcaggctgggcgtggtggctcatgcctgtcatccagccctttgggaggccgaggcaggcagatcacctgaggttgggagttcgagaccagcctgacaaatatggagaaaccccgtctctactaaaaatacaaaaattagccgggtgtggtggtgcatgcctgtaatcccagctactcgggcggctgaggcagacgaatcacttgaacctgggaggcagaggttgcggtgagccaagatcgcaccactgcactccagcctgggcaacgagagggaaacactgtctcaaaaaaaaaaaaaaaaaaaaaaaaaaaaggagagagagacaagaggcagaaattaatgaataggaaaaagttttgcatgggggcccttagatacagataagaggaaaacgtggcctcccagagtggcccagccaacaggtaaccggggagagctgaaagaaggggaagatgtgggctggtggggcccagagtggcctgtttggggcgagtcttgacagggtaggtctcgggaaggcaatttttaagtaggctgaggaaggggaggtgggcattctaagaagataggcaccagctgaaggatggagctgagaataaaatgctacttctaggcagttcctttcacatttatgtatggccacactctgacccagaaatttcatttaaagggatttagctacacctttctaccctctgcacaaaaatgcatgtaatgtgtcagaatgtttattgcagcagagctgctaacagcccatgttgtgaaccactcaaatttccattaatagcagatggtgagtgaatgacgatacattccttatatgagagaagaggatgtagaagaggtatttgcaggataacacagagactatgctcctttaggaacatttcttcactcagtttttttctctgcaaaatgtttgtattaattcatacctgtgccagtctcgctggcagcgggagggattatggtgagcgctcaaggagattatgagtacaggagcctggcggcagctgagttctccaatgttagctattattcttctcattataattatgatattgctagtttacagttttgtatatcaatattcaaggaaaagactggaggaactaaaagtacaggattttggcttaatggattctaactccaaacctctacacaactttttaaaattattactatattttactaaatcccaatgtctgccacttttttttttttttaattttaaagaatacatagcccattgggcaaacttgggtttgcatgcttggcttttcagcagatgcagaagccctggggtgggtttgccctggcttgtgtggttctcgagtttgagtctgtacgtcttgagtgggtcaggggccccagagctttgctgccattgatttctccccaacagcagacaaagtctcacaatgacctcaattttccctctttctttcttttgaaggacccatttttcatggtacttgtcttgactgttttcatagtggttttttttttttttttgagacgggagtttcgctcttgtcgcccaggctggagtgtagtgacgtgatctccattcactgcaacttccgcctcccgggttcaagcaattctcccgcctcggcctcccaagcagctggaactataggcgtgcaccaccatatccggctaattttttgtatttttagtacagatggggtttcaccatgttggccaggctggtctcaaactcctgacctcaggtgatccacctgctttagccacccaaagtgctgggattacaggagtgacccactgcgcccagccaaatctgtatttttgtatgtagagggaaataattttctcaactgtaatcgtgaataaatattgtattaaattgtcatgaaggaactcctgtttaataaatagacatgtaagaaaaaaagaatgaatagtaaaaccaaaccaaaacaaaaaactttggtaattgaaagttctggttagtttttattctaaataagttcaatgtttgacatagttgtagacacctagggagaatctgtagtacctcttcttttctattacttttttttttttttttgagacatagtcttgctctgtcgccaggctggagtacagtggtgagatctcagctcactgcaatctctgcctcccaggttcaagccattctcctgcctcagcctcccgagtacctgggattataggcgcccaccatcatacccagctaatttttgtatttttagtagagacagggatccaccatgttggccacgatggtctcgatctcctgacctcatgatccgcccgcctcggcctcccaaagtgctgggattacaggcatgagccaccgcacccagccttgtagtacctttttaatatcttgtcactttcttattaatctctaactgtacaagttgtatagacaggatgcatatttcacaaaataaaataaaaacattatcaatttaaaagatcattggtatagctgtggtatgatgtgatagtttgtatgtaaccctttagtgcaaataagagttttatattattcatcttcttttcaactgtttaggggtcaccaccagctattggaccttactatgaaaaccatggataccaaccggaaaacccctatcccgcacagcccactgtggtccccactgtctacgaggtgcatccggctcagtactacccgtcccccgtgccccagtacgccccgagggtcctgacgcaggcttccaaccccgtcgtctgcacgcagcccaaatccccatccgggacagtgtgcacctcaagtaggattctctttgtgtttatttcctgtaataaacccggggtcccgggtctacctccccagtgggctctctgctcccaacaccactgtcgccacctctcctggtctgacccttctcctccgtcttccggagccagcctgtcttcatgcctttccactctcttcctgctgggtcaaagctgtcgctgccaggcctagcctcttgcccagggcctgcagatacctccctcttccgttaactctcctgtacagctttgcctgttctactcagcgtaggcttcgagatcaccttctctgggtttcttggctgtgtggtttattggtggctgctcttgaataaatggtaagcttccaagagcagaaatcaactatcttacctttgtcatacagtcccctggatatgacaggtcatgtttaagatgctctctgttactttgtgtttagtagatgacctggctggtgcggttgtcacacagaagtatctgagctgtctcattgggcttcagggtcctgcgggtggccggagcaggccagagcgagcgtgggaggactggaggttaaattttatttgctgtcacttcagtccctcctcttcctcaccctaccattcatctcctttctttgccatttcgtttggtctcatgtctttccagtccgcccctcttgcactgcctcccagctgttaattcaggctagtttcagtgctaagaattgtccaggtggaacccgcacagcagtggctacgccaaagatcttttacattgatcttttaattgatagtgcttttattttattttgtgaaatgtgcatcctgtctctacaacttgtacagttagagattcgtcagaatgtgaatttccatgtgtccacatcacataatcagtcatcaacgtgattaatgccagtgctctgtgaagccctgtctgtccccacctctcccccactcaggacaagtgctgccgctcctgcgtttctacccctcctctcaccccctcacccttcacaaatggctcttccaccctgttcctctccagccacctcctgtctctgagttttctaccccttcatgagccttaattcctttctctcccttctctcattctctctttcccttcttccgatgctccccaccaagcagatacttgtgtttgcactgatgttcttctgggggtggttgggtaggtcaaggccagtggttctcagtcaggacaatttggacccccagagacaattggcggtgtctggagacagtgtgggtggttacaagtggggagggggtgctgctcctaggtaggcaccggggatgctgctcaacctcccgcaaggcacaagacagccccccgacagcaaagaatcctccaggtaaaatatcgcttagtgtggaggttgggaactcctgatctttgtccaccgtggggatggaaggaagccagggtgaaggggataaggaactgtctgtgtgagctacccccctaagaaatggcagtgaaggccctctcctgaagtcagcatctccagacggtggtgttcccaccagtgatggctaaacccaggaaggcagacgaacccctggcccacatgatggacacatttccacgtttcctgggaaagactagatgatgacagagttggacagggatatatcagtcccttatcagttgcttttataagggaagaatatgaacctacatgtatgatttttgcattataaaatttataaactcagaaataatttagtaatttaattgaacttaccctggtactatttttaagaaaacactgttggcatctaatatatagaaatgtatacattttgaaagtgtaatgtttggctttgaaactcttctcccagttattgagtagcaccaattcagaagcacccatcaggagtataaggaatttttctagacttaatgtatttatttgctttagcaacagccgtagaaggttgatgattgagtaggagcgaacacacagcttaaaccttaggctttggagaatcgaaggtccatagtcctccaaatgtgcgtgtgaaacaagcagctaaacgtgagaaaccatgaggctgagttgacaaccttaagttggtcatgattgagggaaatggatagtgggttttgtgtgcgtgggttttttttgttgtttgtttgtttgtttgttttttgagacaaagtctcgctctgtcacccaggctggagtgcagtggcacgatctcagctcactgcaacctctgcctctcaggttcaagcgattctcctgcctcagcctcctgagtagctaggactacaggtgcactactgcttctggctaatttttgtatttttagtagagacggggttttgccatgctggccaggctggtctcgaactcctgacatcaggtgatcctcctgccttggcctcccaaagtgctgagatccactcccaaagtgcatgggtggtatgagccactgtgccgggccagtgagttgtaattaaactgtgcaacagcagccgtgacaagccaagacccagtggtgtctgtactgaccacgcgctgactacagatgcctgtccagcaaagtaaacttgagggcttcccgctttacacactctcctggtgagaactgtacagattggcacatgctcagtgtgaggttcaggatacctaactgaatagccctcatctcagcagaccagttattttatcttggataaaatggcactcgggaagccatagacggaggaaagtgtccttggtaatgggccagagagggcatctggaatttctctcatgaactaccttggccccagcttgcctccatcatatataatcattgcagccgagttatgagaacatcgtgtgcctgggcatggccctcagaccagtggtgctggcctcatctgtgagcctgttagaaattcagattcaggtcgggtgcagtggctcacacctgtaatcccagcactttgagaggctgaggcgagtggatcacttgggcccaggagttcgagaccagcctgggaaacatggtgaaacctcatctaccaaaaatgggccaggcatggtggtgcacatctgtggtcccagctacttgagaggttgaagtggaaagatggcttgagctcaggaggtggaggctgcagtgagccatgattgtgccactgcattccagcccgggcaacaagcaagaccctgtctcaaaaaaaaaaaaaaaaaaaaaaaatgcaatgcagattcatgcccgacccccaactgaaacagaatctctggtgatgggaaccaccacattccccaggtaattcttaagcctgtaacagtttgagagtgatggtagaattatcagaatgttgtcacaaagagagaggtatggcatcgagccctcagcagatgggtcagctctgagcttatcgccctggcagacctccggaggcacaggtgtggccaggtggggagttccaggctgccacaccacctctccagcctgggagggtctgttcaaatgccttctcctcccctctcctccacctctgcacctttcttcagggaaagctcctgggagctcctggacctggggctgctgggcatcactggggtgatggggatggatgccctccctcctggcccatgagctggctgagcccagcgtctgactctgccatgcctctctggcacctgtagctgtcttctgaactctgtgtgacttttggcttaccctctgaccaataatgctatgtctcactagagaaaaatcagtgaccttttccaaattcgttttttttctgaaatgtgcctttcctctgagtttggtatttctgcacttggaccaaaaggcctgcactggcgctgtccagcaggacttagggacaccatgggaaggttctacagctgcactgtctgacatggtagccaccagccacatatgatgactgagcacttgaatttacatcattttacttaattccatgggacattaattaaatagccacatgtagctttggtggatgtccgaatgggacagtagcatccattcgctaaatagccttgggtaagacaatttattctgctttgagtaccactaacagagtgatgatagtttttaggacagtattattattttgcttatgcttgtaattaccaagatgaggtcttagttctttttttttttttacattaatcatctgcctattttaagaccctcttttagcatactatctttttttttttttttgacagagtttttgctctgtcgcccaggctggagtgcagtggtgtgatctcggctcactgcaacctctgcctcctgggttcaagtgattctcctgcctcagcctcccaagtagctaggattacaggcacctgccaccacgcccagctaatttttgtatttttagtagagacgaggtttcaccatgttggccaggctggtcttgaactcttgacctcaagtgatccacccacctcagcctctcaaagtgttaggattacctgcatgagccactgcgcccagcgaagcataccatactttttaaaagagcctaacctcggtgtactttgctgaagatcacagcttcctcctgttggtctccaaattgcataaggtttagtgttatggaagaagtaggatcgtccatgatatttcttaaaattaaaagtcacatttttaagtgtatatgaaataattatttcttaatgtggtgtactataaaaataatagataacatttgagagcatgacttctaaacaactctggtctgaacgttgcactctcctccttcttccagagactaagaaagcactgtgcatcaccttgaccctggggaccttcctcgtgggagctgcgctggccgctggcctactctggaagttcagtaagtgcagggagcctcgatcccaccatgtgctcctgcagtccccagtgctctgagccagaccctgctctctgggctattgagacctctggaggccctccgtgaggttcctctcttacataacgaggctgtctctcttcccttctcttgtttagctatgagattgacacatcatggggaaagcatttagaatgtacccagtgctttggggtgcttggtgccacccagcactgtgagcacaggttcttctaccttggggccacacccagttacctgtatctcactgcacagcagtggctgttggggaccaggcccacccctccatgtcccacctcctgcaactgcagcctgagccttcccatcagcctggggtggtgcagacccatgtgccattgtggatccttcaagttacctgtgtggcagagaggacgtgtgagtgccgtccaaacccaaacactgagagggtccttcccattgcccccacggaagtaaggtgccccagtgctaattccacttatacttgctggtggcaaggacacttctcctccttattaaagtgggggattggctgggtgaggtggctcacgcctgttatcccagcactttaagaggccaaggcaggtggaccacctgaggtcaggagtttgagaccacaagcctggccaacatgttgaaactccatctctactaaaaatacaaaaattagtcaggcgtggtggcgtgcacctgtaatcccagctacttaggaggctggggcaggaggatcacttgaacccaggagttggaggttgcagtgagccaagattgtgcccctgcactccagcctgggtgacagaatgagacttcatctcaaaaacaaaacaaaacaaaacacagtggggccaggagttggaggctgcagcgagctacagtaatgccacggtgttcctcactccatgaggctcattgcgtttctcagcctgaagggcacctctcttctgttttctctgcaagtgggcagcaagtgctccaactctgggatagagtgcgactcctcaggtacctgcatcaacccctctaactggtgtgatggcgtgtcacactgccccggcggggaggacgagaatcggtgtggtgagtcagccttgaccttgggaagggactcctctgctcaccttggagacagcagccgggtccaggggcctttgggtgactgggcctggcgtgcgtccagtacgctgacacatgatgtcattgaatccctgctccaggctgagccctggggctcagagaggttgtgtttccggcccaacctcacccagcaggtgggagatgacagggccaccgaggactgtgtcattggaaccacacgtgctctgaactgccacaggaagtcagttaagatgagcaaactgtttataaagttggagatgcaggctaggaacggtggctcatgcctgtaatcccagcactttgggaggccgaggcagatggatcacctgaggtcaggagtttgagaccagcctgaccaatatggtgaaaccttatctccactaaaaatacaaaaattagccaagcgcggtggcgggtgcctgtaattccagctattcaggaggctgaggcaggagaatcacttgaacctgggaggcggaggttgcagtgagctgagatcacgccactgcattccagcctgggagacagagctggctcaaaaaataaattaattaattaaaaacaaaattggagatgcactatgttattttcaaaacaagctgcctttaaagatctatctgttgtcacagggtgggctcatctgtttcattttattttctgtggtttatctatttattcattttaatgaactaggaagcattgctcctatttatggcataccacatgatgtttggatacgtgtatgcctgtggcatggctaagtcaagctagaacatgggccttacctcatatacgtgtcttattaagaacacataaaacctactcttgtagtgattttcaaatatgcaacatatagtttattaactgcagtcactatgatgtacaatagattgctcgaacttattcctcctgtctaactaagattttgtgacctctgaccaacatctccccagtgttgtcaccccccgcccccagcctctgatagctgcctttctactctctgcttctgtgagtttgatgtttatacattccacatgtaagtggcctcatgcagtgtttctgtctctgtgtctggcttgttcacttagcgtaatgtcctccagcttcatctatgttgttggaaatgacaggatttccttctttcttgtggctgaatagtattgccttgtgcatatacaccacattttctttatcccttcattcactgatggactcttaggttgatgtcatgtcttggctgttgtgaaaaatgccgcagtgagcgtgggcgtgcaggtccctcttcaacacacggatttcctttcctttggatataaacccagcagtgagattgctggatcacatggcagttctgtttctcaccttttgaggaaactccatactgttttccataatggctgtagcaacttccactcccacccccacggtgcaaagtctccatttctcttctacaacctcaccaactcctgttattttccatctttctgatagtagccatttgaagaggtatgagatgatacctcattgtggttttcatttgcatttttatttgtatttttcatgaatttttgagggtgatttcaagggtagttagtgactcgaacagggaaacgatcctgagtatgagggttgtgctaatcatccccctcctgccagctgcgtacggaatggggctctgcagatggcagggagctggctcgtttctctttaagagctgccttttacttttcttcctcttcctttaaaacttatttcctggccggacgcagtggctcatgcctgtaatcccagcactttgggaggccgaggtgggcggatcacgaggtcaggaattccagaccagcctggccaacatggtgaaaccccgtctctactaaaaatacaaaaattagccagacgtggtggtgcgggcctatagtcccagctactcgggaggctgaggcaggagaatcacttgaacctgggaggagggggttgcagtgagccgagattgcgccactgcactccagcctgggcgacagagccagactccatctcaaaaaacaaaaaaaagttatttcccaagcacagccatgtattccaggcttgtggatcagcgttggtggtggtgtgtgctctcatatcttagttccagctaagcacactctgacatgtttacactagaaccatttgttttttctagaaatagaaatttcagaattgtagagtcagaggacttaccagaaatctcttaggtagttctcctcccctccctcaagtgcagtcctaacctcctggagttttctgtagaaaccacaagcctcagagctggccgagaattctagccaaagatttttccatgccaaagtaatcccccctctcctaagggccatccttggtggggactggtttcctgttaagccctcgctgtcagtcctggctgtggaatttcctggtgaggagcactggcccgtggagctcggccctcgtgccggccttgagcaggcccaagtgttccgtgttcttgatacctttcctccagcacagtcttgcttcccagaaaaaggtttgcacttgaaaatgatgcatttgctgattaaacatagttcttttgctttatttggtttctaaaataaagtgggagtttttgagattgagtaacgtgaggttaagatagcacgtggaatggctttttcttttctttctattttttttttttttttcctggagacagggtttcactctgttgcccaggctggagtgcagaggcatgaccatggctcactgcaacttcgatgtcctggggttaagcgatcccccagcctcagccccccaagtggctgggactacaggtgctcgccaccacacctggctaatttttgtattttttgtagaaaatgggtttcatcaatgttgtccagactggtctcgaactcctgacctcaagcaattctcctgcctcagcctcccagactgctgggattacaggcgtgaactaccacgcctggcctggaatggcttttgatgttctcctatgtgcacatgtgggtgaataaacaccaacaaagtccttatgttacctgaagagttgctctcttcttaatatttaagtcgtatttatttaaatactttaatagttgtacactattaaagtattattaggtcaaaatcaaggaagtacaaaagggtatgctgtgaaaaatctcttcttccttgctctgcttacttacctaccccgcatccccccatacaccccagacacacacacacacacacacacacacacacacacacgcatcactcccatacatgcccacctgtttaccagccaatcacatttcttggggcaactcatctgagttgcttctctttccagagagtttttgcataaagaagcacaggtatttctgcgttaccatgaccctatttcccagtggttcctagccagttgactctcctgcactggataccatcctggacagcattccttagggaaatgagccccctgttttttcccaccatggcacagttggtcctttgcatggacgcaccattattgcccctgtctcttcttggtggaccttaaggttttctccatccttttgctgtaacacacactgctccaagtgtgtgagcatatcagtaggaaacgcttccaggagtagaactgctaggtcagagggcgtgtggatctgtaacctgacagacctagaccggcttcagtttggttttatccagtttccatattgattattcatataaaaggaaacagacaaacataacgctgtgcatgtattctctcttagaccagaacaggcatagggtgcacttttaatttgtccatttcgtagagtagaaattgtttttgctgaaatgaacaccttaggatgctgaagaatatgacccgtcccatggaaaacattcaaaaatgtgtgtagcgctttcttcccaagggtgtgtgtgcgcatattttaacactaattcactttctacttccgttgctatcctttctgtgagtctttctcagaatctcagaaaagaaactaaattgttcactctagttatcaatgctgtactctatacctggaatttgctaaaagggcagattttaagtattctcaccacagaaaagagaaaagaaaatggtaattatgtgacgtggtggacatgttaactagctttattatggtgagcatttcacagcggatatccagtcatcacgctgtacacattaaacatgtacaattgggtttttttgagacaaggtctccttctgtcacccagtctggagtgcagtggctcagtcatggctcattgcagcctcgacctcctgggctcaatccatccttccccctcagcctcctgaaaagctggggccacaggcatgtaccatcatgccaggctaatgcatatatatttatattttttggtggagatggggttggtctcgaactctgggctcaagtgatcctcccgccttgcccttccaaagtgctgagattacaggcatgaaccacagcaccaggcctacatgtaaaatttttatttgtcaactatactttgacaaagctgagaaaaaaaatcctaatatttaaaaaaaaaaaaaaaaggactagcttgagaccttttccagctctctggcttatcagctgccgtctcttccgggtgcagatagctggaagggaaagaaaatccctaaaattacccacaagccaagaatgaagtgtctccctttgagccacagtggcagttttgtttttaatcatagaagtgtattttgagccgggtgtgctggctcacgcctgtaatccccgcactttgggaggccgaggtggggggcggagggggtggggatcgcctgaggtcaggagttcgagaccagcctgaccaacatggagaaaccccgtctctactaaaaatacaaaattagccggcgtggtggtgcatgcctgtaatcccagctactcatgaggctgagtcaggagaatctcttgaacccaggaggtggaggttgcggtgagctgagatcatgccattgcactccagcctgggaacaagaaaaaaaaagaagaagaagaagaagtgtattcatttcagttacttttaaaaaagtgaacagactttatattttagagcggttttaggtttacagaaaatgaaacagacagggcagcgagctccttgtactcctccccagcacacagttgccctgttatgaacatcccacatcagtgctgtgcgttcattaacaccgatgaacctgatgcatacattatgatgaactgaagtcctggacttcaccctttctcttgtacagttctgtgggatttgacaaatgcataatgctgtacagccacaatgatagtatcgtccagagtagttctcctgccttaaaacctcttttgctgcacctgtttctctctccccactcaccccagctatctgatcttcttagtgcctccgaagttttggtcttttcaggatgttgtagcgttggaatcatggagtatgtagccttcaccacatacaccttccttcactttgttggcttcctttacttagtaatatgcattcaagtttcctccatgccttttcatggcttgatagctcatttctttttagcaccaaataatattccgttgtccagatgtagcacaatgtttatccattcatgtaacctgtgaccgactcacagataggatgtggaatcactcaccacagaggcattagacaataatcagacccaagtcatttcatgggggaacaagcccacaggtaccagactgtccagtgagtcagggccactcgtaggaagtaagaagagaggctagagcatagccaggtcctcactttatactttaagcccatgtgtatttctcccaaaccacacagcattgtttccatgctttcagctttgcatgaataacgtgatacttgaacgcatcatttatcacttgctctctttcccacagcgctgttttcaagcttcttcctgttcatgatgctctgcttaacccttaagctgcatgggattctgttctgtgaatacgcccaccccatgtattatcctgcccagcaaaaagtccccaaaactctggatggtggttacctctagggagggagagaagagattgggaatagggagcgacttcaacggtgtttgtaatgttttgtttctttaaataaaagagctgagatcatttcagcagaatgttgatttagagtctcctggacaatttgttgctcaaagtgctctcttaaagagcactttaaaaaaaaaaaccttttatcttattatttatttatttatttattgagacggagttttgctctgtcacccaggctggagtggagtggtgtgatctcagctcactgcaacctttacctcctgggttcaagcaattcccctgcctcagcctcccaagtaggtgggattacagatgcgtgccaccacacttggctaatttttgcattttagtagagatcggtttctccatgttggccaggctgatctcaaacgcctgacctcaggtgatctgcccgccttggcctcccaaagtgctggtattacaggcgtgagctaccatgcctggcttatcttatatatttttaaaaacagcttattgagatctaatttatgtaccataaaattcaagtatataattcagtgcttttatatataaaacatatatatgaaatagcttattgagatataattttttatataaaacagcttattgatatgtaatgtatgtaccataaaatttaaatatataattcactggcttttatatattcacgaatatgtgcaactatcaccacagtcaattttagcatattttcatcagctcataaagaaaccccaagcccttgaactatcaccccatatccctcctcccagcccgtccctcctactcataagcaaccactaatctacttagtgtctatagatttcctactctaggcattccatgtgagcgggatcatgcaatacgtgggctcacacaatataagtggcattccatgtgagtcggctcatgcagtatgtccggctcctttcactgagcataaggtcttcagcactcatccaggttgcagcctgtgtctgaatttcattccctcttctggctgaatcgtattccattgtgtatcttggacatatcctattctgctcacccagccgttggtgggcgtttggagtgttttcgcctttcagctgttttaagagggttgcagtgaacatttgtacaagttttggacccaatgcctgttttcaattctcttgtgtagagagcactttttagcagaaaaagaatagatttgtggcctccctttgtgtgcggtcagtgccttgagaagagtgaactgtgctgccacctccggagccgtggagagcgcggggcttgggtagcagctaggacgatacaagttgggacaaggccaggtgcaatggctcacgcctgtaattccaacactttgggagaccgaggcagggggatcacctgaggtcaggagttcaagaccagcctggccaacatggtgaaaccccatctctaataaaacagaaaaattaactggacggggtggtggacgcctgtaatcccagctactcgggaggctgaggcaggagaatcacttgaacctgggaggcggaggctgcagtgagtggagatcagaccactgcacttcagcctaggtgacagagcgagactccgtctcaaaaaaaagaaaaaaaaagaaagaaactcatggataatcctccctctcgtgcagttcgcctctacggaccaaacttcatccttcaggtgtactcatctcagaggaagtcctggcaccctgtgtgccaagacgactggaacgagaactacgggcgggcggcctgcagggacatgggctataagtgagtatggggcagcacccgccgagtgacagtaacagacagcagaaacacgagaagaccctctctctgcctccctgtgaaagcaccggcacatgagtgctggggacaattgtcaccttccaaaagctgagccctataaccagcaggtggaatttgtcctgctagggctgtgcccagcacacagaccttggctcactgccaccttgccctgcctcctccttggcctctatagactcctggttgctcgggagtgcccagtgctgtggtcatctggtcagaggggtaggctgagggcgttaggtgcctctttttccaaggtgcctctcagccagggtccattcacctccctgggtagaggttggaccagaacagctggcgaggagggttgggctggggagagcagcagagacaaatcctgtgccagtttcacttcattcgggagccatggaagccttttgagctggggagagaatcaatcaatcagactgatacttaaaaaatgtcattcctgctcgtagctctgagggaaggtgggaaggcttaacagggtgtgtgtcgcctgacagtgattcctaacgggggtggggcggtggttaccatttaccagcactgcctggggagatgcggcagccctcaggcatcgggggagagggtggtaggatgctactgccactttgttttccatgggagggtccccaggtgatttctatgcaactttagggtattcaatatgccagttttcagaatgaattaccactcggtgagaaagttggcatcttagctagtcactgtgacatccctaaacagcaggggtgaattacacagcaaagcccccccatcacagtccaggaacctggtggaattgataactggggccatgttaacatctgtaccttttattagattaaatgtgtgtatgattatacaatcctatgtccttctcatagtttcttgatcctaacctggataagaaacacgaccaatgaaggaattttgtctgacactttagggttattgaatcgaaaaatcgttacaatattctagcacttggttagaacgtgtgattttttttcctaaatgctaaggtttttccctcttattctgaatgtcgtatgagcggtattatgacatagtataggatttgtgtttgcttatgccttaaccattatcacaaataaggttttcttttttaggaataatttttactctagccaaggaatagtggatgacagcggatccaccagctttatgaaactgaacacaagtgccggcaatgtcgatatctataaaaaactgtaccacaggtatgcagcaatttcttcttgaaaaattttggaatgaaatcaactaggagacaccatggggaatcgttgtcctgagtctgatttctctgagctgcaatactcggtctggatgggttttgcattgggaggagattagagtctgaccaggcctggttactctaagcagcccttggtttattcataggaagtggctgaggtttctctgctatttcattttcagcctctaccgtctgcccttgttggtagcggctcacacttgcaacatcgacattcaactctatttagttttctttcctcttcagacatttagaggtgtacctattttgtcagggcgtggttctaggaatccaagataatgtctcagtgtcccagccagggtgaccggctcattccagtttgccagggacttcactggcttgagcaagggaagtcctgctccattccaggcagctgggctggctggtcccgttagccccaaccccgggacagcagtgccagagggtgctctgtgagggatgggcagcattctggcggcctgggaatgagttgtggtgtttccagggggtagaagtgggtacaagccacaggtcacatgatgagtggctgacctggctgggagggcagaagaggggatggacttaggctcttccttttgctttgcacatatttaggatgtttgcagacttgctatgattgttgctgttatgtgttttctgatgtgaaagatacacagtgtcctttgcccatgagctctccttgcctcccaggtccccagggcttatgcctggtgtctaggcatcacctccctgcctgccaggtgccaggtgctgcatttcgggggaggatgaactaatcaccccgcgccacctttcctctgagtgggagcctggggcaggtttgcattcctggaggccgctggtggaggggtctgggggcctgacttccactgcagcctgctgtcctggggaatgtggcagggcaagcccagtggggagggctgtgcacggccaggtgcacccatcaaaacagcagggctgcggtttgtccctgtggagaagctaaacacagctgcctgggcactttgtaaatgctgagtggttctttgtctttctgggttacacacggaatcagggagccaagtccagccgggcagggacggggggaggggaggaggtgctgccgtcccttggcaagagccttgggaactcacaaggaggctggagggcttggaagaaagaagagaaggccattgtctggtaggctctattctatctcggtggtggtggtggggggaggcgcacttcttttcctctttctgtgcagcagttgccctttgatgcctgagttcttggcttgttttctgtcgggcttctgtgaataaccacatgtgccctggcgctgtgaccacacagggctatccctaccgaccttaggattcttaggaaatgtcttctcttaaaggggacatgtcttcacttggccgtgtcagtgccccagagccagagtccacctggaatgcacctgtagtcactgagaacccggggggtgtgccttagtaagaaggtgtcaggaaggacctattattgtagggcctgggctcctgcaaggtggtttgggggtggttggaggaagcagagatttgctctggattggatgctgtcaggaagcaggggtaattctgtgaggctgctttattattttttttctaggaggaggttggaatgaggctaggctaaagctgtgattggtaaagaaacgtccgtcgctcaagttagccaggacaggaggagacatcagatcgtgattttgtggttgtgagcacaaggttcctgttctgtctgttcagacatcatttcggaggaggctccttgtgtcttgccccatctcaggcatggaggggcctagtccgatattgacgctcagtgaaataattcaggttccgcagagcacacggcccagctatcagggcgggccagctctgcatgccaggggccgcgtcttcccttctcagcatagcctgggaaattcactgcaggacaaaatgcatcagttacttcctcttcatccataacctgggatgtttgactcccaaatgagtaactcttacgtttcttctaatcctagggaaactattggttatattgctttcaacactacaaatttaaagcagttataggagcccagaggtttccaaatggcttccttaaaaattagaagatgattttaaattccaagaggaaaaacaaaactagcattattgtatacttaccctcacaaccgtcctaggagctggtacaattttaagagaggttaagtaacttgcccaaggtcacactgtggggatgtgagccgcgtaccttggctcagtgtctggtctttgccactgtccctatatggatttacttaccttattggagttgtaactagcagacccttctatgtctcagaagacaggagagggaacatcggaagaaatgactgatttctaagcatgtgagaggcaggtgactccgcactatcgtgaccagaatttcccctgttctttttgcagtgatgcctgttcttcaaaagcagtggtttctttacgctgtataggtaagttcatctggagtcccccttttgatacttctaactaggaaaagctctctactttcagaacagtactccctgtgtctctgggggcgtgggagggaagaaggtggggtcacgggttggaatgtgcccagcggcgtctcgctctttccaaggagctcctggtttagatttccatggcctgtagacaccttcagccttgggtccaagggacaccccctgagatcaggcacgctcaagaagctgacaaagccctacactttatgccacccatgagctggaggcccggcaggtctctttctccagaaagcaaaggggggtggcgttagtgagccctggcagccacctaacgtggacttggagcatctgcggggctgtggtccagcaccaccgtgtggccaccaggtgctcatcagccagtgggacccgggaggagggacaagaccagagaacaacagtgctcttgcctcttctctcctgaattttggacggtggcttagacttgggtgtccccatctctgtgtttagagtgcttacagtttccaaactgtttgcaaatgtggaagccaccgtccctctcctctgggatggcccagtgctgtcgtggggccgtggtcctgagctcagcttttcatttgaagaggtggaaggagctgacaccgtcccatcccggcagggctggctcaggtcttctttaggtcctgagtgggggtccagcacagccccaagggtgcgtggcacccgccctgccctctgcccatgcactcatctcctggtggagaagacactcacacacaggaagcagggaaggcagcagacctcactcacccctcaccccctcactcaccccctactcaccccctcaacctctcattcaccacccaccccctcgccccctcactcaccccctcactccctcaaccctcactcacctcctcactccctcaaccctcactcacctcctcacctcctcactctccccctcatccctccctcaccccaccccgtcacctcctcactcacctcctcaccccctcactcacccttcaccccctcactcaccacctcacctcctcactcaccccctactcaacccctcattcacccctcaccccctcactcacccctgcaccccctcactcaccccttcatccactcacccacctgctcacctcctcactcaacccctcaccccctcactaatccctcactccctcaccccctcacgccctcactcacaccttcacctcctcactcaccccctcaccccctcaaccccttacttaccccctcactcatcccttcacccctcactcaccccctctctcacccattcaccccctcactcatgccttcaccccctcactcacctcctcactcacaccttcacccctcagtcaccccctcactcaccccttcaccccctcaatcatgccttcactccctcactcaccccttcaccctctgaattactccctcatcccctcactcaccccctcactcaccccttcaccccctcacccaccacctcacccacccctcacccaccccctcacctccttacccctcacccccctcactcacccctcaccccctcactcaccacctcacccacccctcacccaccccctcactcactccctcatcccctcactcaccccctcaccccctcactcaccccctcacccacccctcacccaccccctcaccccctcactcaccccttcaccccctcactcaccccctcactcaccccttcaccccctcactcaccacctcacccacccctcacccaccccctcactcactccctcaccccctcactcaccccctcaccccctcactcaccccctcatctcctcactcaccccctcacctcctcactcacccgctcacctcctcactcaccccctcgccccctcactcacccctcaccccctcaccccctcactcacccctcaccccctcgccccctcactcaccccctcgccccctcactcacccctcaccccctcaccccctcactcatcccctcacctcctcactcaccccctcacctcctcactcaccccctcacctcctcactcaccccctcacctcctcacccaccccctcactcactccctcaccccctcaccccctcactcaccccctcacctcctcactcaccccctcacctcctcacccaccccctcactcactccctcaccccctcaccccctcactcaccccctcacctcctcactcaccccctcacctcctcactcaccccctcacctcctcactcatgccctcaccccctcactcaccctttcacctccttgctcatcccctcacttaccccctcacttcgtcaatcacccccccacctcgtcaatcaccccctcaccttttcactcaccccctcactcacccccttacttcctcacttacctcctcaccccccactcaccccctcaccccccactcaccccctcaccccacactcaccccctcaccccccactcaccccctcacccctctcacctcctcactcaccccctcacctcctcacttatcccctcaccccctcaattaccccctcaccccctcaattactccctcatcctttcaattacccactcaccccctcacctcctcactcctcactcactccctcactcaccccttcaccttctcactcacctcctcgtctcctcaccccctcactcacttccagccctgcccctcccatcttccttttctttgtgtgagaatctggggtccctgagtggtgtcagtccctccaagactcaaggagtccccagggccttgttatccagaacacccccacctgggtcccgggagaccccatgggatcacaggagtgttcagggaagtggtgcttcctgggtctgggtgggctggaggggcatcctcccttccccaagaggagacccccaggagccccctaagtccatccccagcagtggtgcccctgccctgtccttgcagcctgggagacccttgggaggggcgggcgctgggtggctgggcggcttctgctggtctcaccccactggcctcctgtttgtcatcctcagcctgcggggtcaacttgaactcaagccgccagagcaggattgtgggcggcgagagcgcgctcccgggggcctggccctggcaggtcagcctgcacgtccagaacgtccacgtgtgcggaggctccatcatcacccccgagtggatcgtgacagccgcccactgcgtggaaaagtatgccaggggcggcgcgggccgggtgggggctcagggctggcctacagccaccctgtgaccttgagcaggtctcaacccttgcagccccggcatccttgtgtttaaatggggagagtattgcacctgcttcctagggctgtgagacatcaagtgcgctcatgccaggcagtgcatggctgtatgcactgagtgtcccctgcacgcagggcacagggtgcaggtggaacattctccacgatgtcgccgtgaccagcgttccttccagccactgtcctctgagctctgtcctgcccttgagcaaagcccctgccccctgaggtatcctgtctccgggacgctagtcccaggagagggcacactcagacaggcttcaggctgccctgctggaaggtccctggggttaagcgttcttggccacagcattgctcatgcagagggttaggtaggggtgaggctagccgtgacagtattagcatttatggacgctaccaccccctccccttttccttaaacacatagtgcttttggtcacatgctgctttggaggaggcctcacttggcggatgtatttttctgccttagagagaggctgaactgggtttgactgttggcccagccctctcttgctgcgtgcccttagacgattcactcaacgtctctgatccatggcatgtacaactataagatgggcatgcccttctcctctcgggctgttatgaaggtcaaggaagcaagggctgttacccaagggtgctcccttctctccccctcttcacacccccaggtgctctgggccctctaggaactgggtttctctcaagggctgttacccaagggtgctcccttctctccccctcttcacaccactgggtgctctgggcccactaggagctgggattctcttaagagggaaactcttggataaaggaaatggtttgattgatatcggacaagtctgttcattagtatccatttattaagcacctaccatgtgccaggaaatgctttggcgtacaaaggaaaataagggccagtcctgctagaaatggccttgaaaccccagggagggatgtcggcccattgtgggtgctgcagattccttgaaggtgatgcaagagccagaaagaaggatgatgtggggggctgaggcagggagtcggggttgggggagtgtgggggagaaggggagaccgagcacctcttccactatctccctgtgtggtttttggtgaaccatcctgcctctgggtgtcttgcctccagcttctgacgttggaagttcatccactgagagctctgtgtttatggctctgagatactgagtccttcttctctcccagacctcttaacaatccatggcattggacggcatttgcggggattttgagacaatctttcatgttctatggagccggataccaagtagaaaaagtgatttctcatccaaattatgactccaagaccaagaacaatgacattgcgctgatgaagctgcagaagcctctgactttcaacggtacgtgtggctcaggcttggcaagcaggttggcagaatcttaaagagatgttgattggaaatgacacttgtgctatgccaaatggaagggaggcatttgcgttgagcgagggtagcgtgcagcgggtggccaatgggagaggctcacagaggctaagagcacctgccgcattttgggggaggcagcagccaccacatctgttctgtactgtactgagtggtggtgattcaagccaggcatggaaaaggctagaacagggctttcccactgcagcacccttgacatctgggtggttctctgttgtagggctctcttgtgccttgtaggatgtttaacagcgtccccagcctctacccactggaggccagtagctaccaagctgtgacaaccagtgttgcctgctgacattgccaaacatccgctttgaggcaaagtcacttccagttgagaactactggcctaaaatgtgtaaagatccttgatttttaaagatacattctaaaaccaagttgcttaattcaggacaaacatgctttctcttagcctcttattcggtcccactctggtccatccaagggtctggaatgttctagccccatgtggatacagaagaagcaaaacctcagccctccctacagcatgtctgtattcacattgggaaatggttcacatatagaagagcgaatgcctgagcaatggcgtggtgcctctggggcgaaagctgactccattgactccatcggctttttggctgttgcctcctgtgtgtctttcccgtcttgatcacctggagatatgtaattttggaagcagagctagcaaataattcctcttataagcagagctagcaaataattctacttataagtagcataacgtcttgcctgccagaaggagaggtctggcagggggagaaagtgagaatgtgggacttgttgggatgcagggtcctctgggcagggtggccagggtgccaggcccagcagcctgcatgtgggaaggccaggtggagacataggtgatacccgcctggctcactgtgttttctcttcttgaaacagacctagtgaaaccagtgtgtctgcccaacccaggcatgatgctgcagccagaacagctctgctggatttccgggtggggggccaccgaggagaaaggtgaggctgctcctgggcacacaggactgcagggcccacagatggagcattgggttcggaagtgggaggtccaggttttaatcccagttctactactcaatgactggatgactttggttgattcccccagtccttgtgcctcagtttctccatctgctaagtgggagaaatcctgcccagcctacctaatacactgtgttcttatcgtgatcacacagagcagcatgtggaatggcttttgaagtatctgggccatacgagtttagaggtgcaggatctcctgtgttgcactcattgtgagtttagagctgccctggagatcccaccaaggcctgcgtggctgagtgacagggggcttggtgaggacgggcatcctggacccatggtggccacatctaagcctgtcctctgccctgataaccacagagagaggctctctccacccacttcctttgcaatctgcatttctctctgacagtctttcaaatgaagggagcctggctgcttcatttttatggagggttggaagtgcttagtggcaggcacaaaggttcattttacatattgtttatatccttctcaaaagcgtctaggccatacagacaacaaatcctttcaaacaaggggaaaagtacaaaggttgggtgatttctggggagcgtcagggaaggtagtggggggcatcctggctcctcatcagcagaaacttactacagtagagccacaggctgggcaaaagacctcatggaatccaagatgaagggaatatcgacaaatatttgtgcgcacctgcacctagtacaggctgggtgctactcaggtgctgggaatgcagaagtgaacagagtaagacaaatgtctctgctgtcaggagctttacctctcttctggatgtcggtggtggggacggggcaggtgtggtcagacagatgggagacaaacaactgagcgaggtacttccaaacatctgagggtggggatcacaaggtcccggctattttgaaggggtggtcaggaaaggcttctcggaagaggtggcatttgagctgagactcaaatggcaaaaatgtgtacacatcaaaaaggctagtgcatgtatcttcaggtgtggtcaaggggccaaggaggtgggctggggccagattgcataggtccttgtggattatggtgaagacaccagcttctcatctgcttgaggtggggagatcgtgagccggggagtgccatgatctggcagctgcgtggggagtggggatgaatggatggagacgaggatgatggtgacaagtccattgctgtggttccttgagacaggaagccagctcatagcagagtgcgggcgtggatgtgaagagatgagggtacactagggctagagccaccagacttactgatgggttgcatgtctgtgggagagagagtgagaagtcagggacgatggctttccactctgtggctgaagccccagggtggcgggtggtgccatttttcaagccaggaaatattggttggtgagaatttggggtgggagaaggtgtgacggagggttctggttttgcacactaagcccacggtgcccagaagatgcccgaggggaggcagcaaagcgagagtgggaaatgcagaggtggcaagtgcaggccgtgtcttgagaagctctaatgtgcaggggagccgagaagcaggcggcctagggagggtcacgtgtgctccagaagagtgtgtgcatgccagaggggaaacaggcgcctgtgtgtcctgggtggggttcagtgaggagtgggaaattggttcagcagaaccaagccgttgggtgaataagagggggattccatggcactgatagagccctatagtttcagagctgggaatttctttccctgaagctgaactccagagctgcattcagcacaggcaccgccagttgtaaggagaatccaggtttcccaggagaggggttggtgctgggatgagctgaccggggcagggctggaaaatagggctgtgaccatctgtgtagtgcgtgtggaggtctcagggagggaagtgtgctctccctgcgagagctgcaggcaacactgggagctcaacaagtctccctgtccttagggaagacctcagaagtgctgaacgctgccaaggtgcttctcattgagacacagagatgcaacagcagatatgtctatgacaacctgatcacaccagccatgatctgtgccggcttcctgcaggggaacgtcgattcttgccaggtaattcaacatttttattctacctttggtccttaccagatcctactgaaccccccatgagagagagggcattcttggggtcagcagagcctcctcagtgacacggagccagctcggggcagtcatgggaagtgacggccacaaacagtgcgaacgcttctggtggcagaaggaagtacagtcaacaaatcacacacaccctctgaaaaaccggtatttggtaaaagtgccagtggaacagaaacaagtatttagactattttaaattatgaacggcaatttatttagtaacttttagcttgaacagattaaaattcaggatgggggctatctctttgggggttacatctctgttaccatcaccccttgatggtggagattcgaagcccacacagtcactcgtaactcacactgcgacccccgccccccaactcctctaggcctggtcagtggtgtgcggcagattgtgacttgattttctgctctctgtaccttgctgtgtcccacagggtgacagtggagggcctctggtcacttcgaagaacaatatctggtggctgataggggatacaagctggggttctggctgtgccaaagcttacagaccaggagtgtacgggaatgtgatggtattcacggactggatttatcgacaaatgagggtaactatcctgtcctccttctgactgtgttctccgattcctcgagccaaagccagacatctgttaggcgtggttctgctgctggaagctgactggtgaccactggtcagcatgaagcaaactctgcttcctccagccacagccccatccccccagtgtccacccattgcccattgcctctcactggcttcacttgcatatttcccctggtgtttggatgaaaagcgctggggctcagcttgtgtgaaattccttggtgctctgccaaccacacttcgttctggctcagctgactcagctgttccacccaggccacctcacatcaaactttttttttttttttttgagatggagtctcactgtgtcgcccaggctggagtgcagtggcacaatctcgactcactgcaacctttgcctcctgggttcaagtgattctcctgcctcagcctcccaagtagctgggactacaggcatgcgccaccacgcccagctactttttgtatttttagtagagatggggtttctccatgttggccaggctggtctcgaagccctgacctcaggtgattcacccacctcagcctcccacagtgctgggattacaagtgtgaaccacggtgcccggcctcacatgaaacttttgatttatagagagcagagggaagagccggctgtgcccatccttttctggggccatcgagtggctcctgggcagcccccaaggttaggaagggcaggagcagccagggttctctgatgccccagactcaagcacgagggaaggtctcaggggttccatgtgagcctcatggatgtctctgcttagcagagccctggctttgggcattgtccagatagggggtgagaaccagatcttctcatctccaggacctcagacgtatagttttctcagatttctgtgctttctggggctgggctactagtggaagaaagcagtctattctgtcttctcccaaatctcccagatgcccagtctgttgaaggaggagcagaaccagggggcctttcccgctgaggcccgacctgtgtctccttcaaatgacacgcgggactcagggccttcccatgaccatggggcccagggggcgtcacctggcccagggcccagtgctagaaacagatgaccccaggaggaggaggcagggcaggagggaagctggcagggctgggatggtcagccaggctgaggggcggactcgcaccaggatggagctaggaaatgatccaggtgtgtttggcggctgcaggtgggtccgcatggctgtgcagggagggaagggctgcgtggcaggagagcagccgggggaggcccagactctgctgaagagatgcctgttgtgccggcctccacatccgctgcccgctccttccggagctcctgccccgccatgctcagcctgactctgaccaacacgttggagagaagaatgatccctttgtgctattaagcttgcttatttggtttctaagtgcttcatgcgaacctagaggaaaaaattattttccacctttgtttgtcttaagaaaataacacacttttttttttcctatttgaacaggcagacggctaatccacatggtcttcgtccttgacgtcgttttacaagaaaacaatggggctggttttgcttccccgtgcatgatttactcttagagatgattcagaggtcacttcatttttattaaacagtgaacttgtctggctttggcactctctgccattctgtgcaggctgcagtggctcccctgcccagcctgctctccctaaccccttgtccgcaaggggtgatggccggctggttgtgggcactggcggtcaagtgtggaggagaggggtggaggctgccccattgagatcttcctgctgagtcctttccaggggccaattttggatgagcatggagctgtcacctctcagctgctggatgacttgagatgaaaaaggagagacatggaaagggagacagccaggtggcacctgcagcggctgccctctggggccacttggtagtgtccccagcctacctctccacaaggggattttgctgatgggttcttagagccttagcagccctggatggtggccagaaataaagggaccagcccttcatgggtggtgacgtggtagtcacttgtaaggggaacagaaacatttttgttcttatggggtgagaatatagacagtgcccttggtgcgagggaagcaattgaaaaggaacttgccctgagcactcctggtgcaggtctccacctgcacattgggtggggctcctgggagggagactcagccttcctcctcatcctccctgaccctgctcctagcaccctggagagtgcacatgccccttggtcctggcagggcgccaagtctggcaccatgttggcctcttcaggcctgctagtcactggaaattgaggtccatgggggaaatcaaggatgctcagtttaaggtacactgtttccatgttatgtttctacacattgctacctcagtgctcctggaaacttagcttttgatgtctccaagtagtccaccttcatttaactctttgaaactgtatcatctttgccaagtaagagtggtggcctatttcagctgctttgacaaaatgactggctcctgacttaacgttctataaatgaatgtgctgaagcaaagtgcccatggtggcggcgaagaagagaaagatgtgttttgttttggactctctgtggtcccttccaatgctgtgggtttccaaccaggggaagggtcccttttgcattgccaagtgccataaccatgagcactactctaccatggttctgcctcctggccaagcaggctggtttgcaagaatgaaatgaatgattctacagctaggacttaaccttgaaatggaaagtcatgcaatcccatttgcaggatctgtctgtgcacatgcctctgtagagagcagcattcccagggaccttggaaacagttggcactgtaaggtgcttgctccccaagacacatcctaaaaggtgttgtaatggtgaaaacgtcttccttctttattgccccttcttatttatgtgaacaactgtttgtctttttttgtatcttttttaaactgtaaagttcaattgtgaaaatgaatatcatgcaaataaattatgcaatttttttttcaaagtaa

SEQ ID NO: 755 - DNA, 1154 bp, Homo sapiens
ctgatgtaacagccttgggaaagaggttgcagtgaaaagctggtcctgctgtggtggagagaatggaggaaagataataaaaggccaaacctttgctccaactttctccttagcttccctttggatctggaaagctggggacccacacggcagagccatggtactggaggagccattaacaaagctttcaataaacctctctttcttgaagttacctgagaatggatccattccctgcaactgaagattctaaggaactgggtttctcagtatacaatgggaatggttgggaggaggtaaagagtagaagacagtatcaagaatccagagcccagcacctgtagtcctaactattcagattccttgagcccaggagtttgagtccagcctggacaacatattgagacccccatctctctaaaaaaaaagagaaagaaagaaggaaagaaaaaaagaaagaaagaaagaaagaaagaaagaaagaaagaaagaaagaaagagaaagaaagaaggaaagaaggaaagaaggaaagaaagaaagaaagagaaagaaagaaaagaagattgtagctagggggagagtaggtgaaaagatgaacaacatgaccgggaagatttcctaatctcaccacagcctggctctaccttaagtctttaataaaagcttgactgaaggtaccaaggtgtgctgaagtggaagcaaagttctccaaagtccagcatggtagacatcagtggtggtaaccaaggacagaccccaaggcaaggtgaacctcaaaaatggaacctcaagtctatgcagtccagctgccctccccaccagaaagtccttgttccagcccaacatcagtgcctctgagtttgtttactagaaacaaaggaagaatttccttgtaaaaatatagacagagtagtccctggctttctcctcttgcaggaaggatggattctcccattccataccatctttcccccacactggccccagaaatacttaattcaactatgtgaaaataaagattgtttttggtttgagggcatagggatccatttatccttattctttatgaggcactaaattagctttgtatgttattaaatgtgtctcgtcaatgctgttggcattgtttcattttaaaaaaaaaaaaaaaaaa

SEQ ID NO: 756 - DNA, 15062 bp, Homo sapiens
gaatgagaggggaggggacagaggactcctgagcagagaccccacccctggaccatgtgatcttggaaagtgctcctgccctgggaggaggctcagcacagaggtaggaaggacagcagagctgacagtcacagcagccctgacaagagagttcctggagcccaagctcttctccacagaggacaagcaggcagcagagaccatggggtccccttcagcctgtccatacagagtgtgcattccctggcaggggctcctgctcacaggtgaggggaggacttcctgggagtgggtgggaggagggccagagagactggctggggtctccttgggaggacggggctctgagaggggacaaagggcttctgttgaagtcctttgggagaggacaccagacagggacaggaaaccagaacaggaaaatcacattggactggaattggaaagggtcaagaaaatctcacatgttctcttttcctggttaatcatcactagctgctacattttgaaatatgataataataactatatcatgtgacgcttcaaataaaaacataaccagggcataaaacattgtccctagccaccaacctcaggcattggaaaataaaccccaggatgtggagggagggccctgggaactctcatgaactcatctactggagcctgcagcctgttccaggcactggggtgcaatccagttcacacaagtccctgccctcacagagctcacgctctcatgcggcagaagacagacaggcaaagagatctagaatgtgaagccaggtgttgacaagagctctaaagggaacagagcagggaaatgtcagaaacggaacacccagggcttctagagaaggtgtcagggaaggggtctcccaaggatgccctgatgtaagcaggtccagcagtatggagggagccctgcagatccctggggaagaggattccgaacagggaaatgtaaggtcagaggtgctgataggggacatgctgctgtcattgatccagtaggacacacacacacacacacacttacttcaagatgggggtgggtgaagagacctgctcaggatccagggccccatctttccaccccaatacataggtcccaatattgactgatgttctctccccctcctagcctcgcttttaaccttctggaacctgccaaacagtgcccagaccaatattgatgtcgtgccgttcaatgtcgcagaagggaaggaggtccttctagtagtccataatgagtcccagaatctttatggctacaactggtacaaaggggaaagggtgcatgccaactatcgaattataggatatgtaaaaaatataagtcaagaaaatgccccagggcccgcacacaacggtcgagagacaatataccccaatggaaccctgctgatccagaacgtcacccacaatgacgcaggattctataccctacacgttataaaagaaaatcttgtgaatgaagaagtaaccagacaattctacgtattctgtgagtgatacctccatgacttctgggtgctgggggccagttctacttcatacacacggggttgtcaggcctgggttgtgcctgtgtccccatctacattttatccagtgttggagtttgggcatttagtgaaggacacacatgggggagacaaacttctacagaccagaatccctttcctgcatccagaccctgcagatacttgctgcagaggaaggacagtctgatggggggcactcagcagggggagatcagtctcagccaagattctgtgccctccccctgaaaaagaccctggagaactgggtcagagcctggcctgaggagtcccctggaatcctcacagagaagctcagccctggaagcacaagtcccagatccctgtcccagggctcttgactccaggtgaccctaaggaacctgtgtcagggctgggttgtggcctcctgggctgaactgactgagagcaaggatttgagctgtttgaggatcatggctcatggagctggtcaccagcctggtcacccccagggcctcatctgggcaaggacagagcctcatccttcacctgagactcagcctggagaggacagatgaacaggattactaggacctcagtccccctggatgaggaacttaagagaggtcctaggggagtcagtgtcctcagggggagaaaaagaagaagaaagtttctgctgtaagttctttgtacaccaggaatcaggtccaaataacccactcctggaggcaaacaatcagagatcctgcttgtttgggcagctcttctacagagggctctcatccaggtaattgtgattattttaagatgaattaacagacagcaaggcaagccagagaccatttacgctttatctcattttgttaaaggaaactgaggcagaaggaaatacagccactgaggcagggtctcacggaccggacagtcacatcagagtccccaggtctttgtagccacagagcttgcttcctaggcatccaagccagaagtgggagattctggtctagggagtgaggaacaaatagagaattagtttttacctagaactgaatctcttgcctcaactatcagagtcagtgctgggaatgtccaggcctctcccttagattcacactcctaccctcactggacctgaaatcctgtgtttcctgatgtgttggtgtcactcccacaggaggataaaggagaagactttgctttctctccccactcacaccctgcacatgccagggcccaaagtgagaaacacactcgctcagtagttctctcatgaaggagggagggaatgaatgaaggaatgaatgatccataatctcttcagagactggaacctgatgcaggatcctaggaggctctggcacctgttccctgtccctccaaggggctgagacccatgttccccctctctcatcccctgcccctaaagccaccccagtgggagactgagacaggagggtgtcttgagccaggagttcaagaccagcctgggcaacatagcaagatccctggatcttaaaaaaaaaagaagccacccaggtgttgagtctcatgactgtgtaaatgcttggccatgggacagggatgagcaactcctctatctgctctctacactgactcaccagggggccagaggcaggacaagtgtgcagtccccaaagcccatgggttcattccacccattttactaccaactccatcctcatcttgctgtggggctaaggtcctccagtcattcccgggacctcctccaggtgcagcggcctaggcaggtgctgtctgatgggtttgctgtccattccacatacacctgtgtcctcatgatgacaccattgtcataaggtggggtcccttggaatgggaactgcaccagccactggcatctcacttagactctgcctagtttagatgaatttgatcaaactcttgttgtgtttccgtaggtcgagagaaaaggaagaaagcatttctcatgcctgtgttgggatttcctccgttttgctgactgcacaggagctggggacagggagctctttgtaaatttcctaacataacacacatctcttctcctaatttgtcttcattgttcttgttatgtcattgagaatcctcagattttcagccagcccctgcttgtctcactcaccctttctctatcttcttctggactctgctgcactttcctggcggtcactagctcttgtcagtcaccatcaaacacccgggtagagctgccccacctggaggccctgcagtctgagtactaaactcacctctagactttttcctggtctcctctgctatgtctgctcaaacacccattgttatcatcacccatctctgggatatccttggaaaaaaaaggctcagagaaacacctcttggctgggtggtgtaggagtgttcagctggaaggaactcagctcctgcccattcgaggtgaggaccccaaagggccaggtaggcagccatcaggaaaggaccaggagaggcaccagtggctgtgattgatggtcctgggtctgtccatgggccaacgctgctgcacaatttacacttgagaaagtctgtgcttctctaagacaaatcaggcagcctcacagtgtctgagctctcagatcattgtgcatctgtcttgtgatacacacaccttctgtgggcttttaaggacttgagtgggcttagaggtgggagatgccaactctgattgaaagatgtccgtgggggaaccaagggggccacacagggcaatcttttctctctcttatctgcacagcggagccacccaagccctccatcaccagcaacaacttcaatccggtggagaacaaagatattgtggttttaacctgtcaacctgagactcagaacacaacctacctgtggtgggtaaacaatcagagcctcctggtcagtcccaggctgctgctctccactgacaacaggaccctcgttctactcagcgccacaaagaatgacataggaccctatgaatgtgaaatacagaacccagtgggtgccagccgcagtgacccagtcaccctgaatgtccgctgtgagtatcttctgttcctctgtggcccaggctgacagcccaaatccatgcagccagagaccaggcctcttagtccctctcaggtccaagtacacagaccctcacctctaggcacccaggctggccatgactttctgccacaagcaaacctgggcagacccagccttgaccaagaatatgagaggaggggctgctcctgtcctgggaggctcagggtccacagcttgtgatgggagaaacaggtgaatgtctcaggctcagtgaacacatcggggtttggttgggacttcaggattgtgatttgggtaagagggacagtgcagcccttccacagaccaggagcttccgcttccctctgaggacatcacttacggctttattctctttgctccgggtggcttggacaccccttctaccccagatatatcttacgagttaggagcaaaccttagactcttcatccatgtggcctctaacccaccctctccgtatttttggctgagtaatggaaaccttctgcaacacatgcaagagctctttatccccaaagcactgcaaagaatagtgtatcctatacctgctatgcccacaaattggccactgaccgcaatagtaccacagtcaagatgatcacagtccgtggtacatggatccctggaccgttggcatcatattttgagatggggtctctctggtgttaaggaagagctgaaaaaacttttcttttccagcctgtgtcccatgggcacaagcagatcccaaattctccccgctgaaccctctcactctgtctctgcagaccctcctccctgtacttcagtaatttctcatggctgattatggatccagcctggaatgtggggagggggctccctcagccccaaagccccaggtagtggaaagagcttcacagagggaaaagcaggaagggtccttaagggttctctcggtcatcaatacgtccctttttgtcacctctttgtgttcttttgcctaattcatgagctacaaggaagaaggaagctttgaaacatctcacactttttccccagatgagaggaggaaaccccttggacgagggaggagcagctcagagtctgctccctgctctgctcccggctcacctggtgactggccctgccctgactccacctggggtgggacctgggtgtgtggagaaggtgcttgggcgacctgtcctgaatctggctaaattgagctgtcaatcaatggcagagcctctcctgggtcaggcttcagggaactgggaagagagggagccctggggcagactcttgaactgtggcctggctctgaagtcaccggctgtatgacgctgtggacacagcacagagcacagctagggatgaacatttggacaaatagggagattcagccaccgggactctgcaagggagggaaggggcagggccacaaagtgtgtatttatagcgaggataagagtaccagccactatatattcataaaggttaagcactcataacctgaaatttaccatattagccattttacatatacggtttagggctgggcgcggtggctgattcctgtaattccagcacttcgagaggttgagatgggtggctcgcttgagctcaggagttcaataccagcctgcacaacatggtgaaacactgtcttcccaaaaaattagcgaaacatggtggcacatggcctgtagttccaactacttggtgggctgaggcgggaggaccacttcagcccagaatgtcgaggctccagtgagccttgattgcgccattgaattccagcctcggtgacagagtgagaccctgtctccaaaaaaagtatggtttagtgatatcaattatatttatactgttgtgcaaccatcaccgctatccatttccagaactttttcaactcaccatgctaaacctctgcactcaataaacagtaactctccactccttctaaccctagtccctggtagccatcattctactttctgtctgtctgtaattgactattttattaataagtacctcacatcaatagactcatacaaaatttgtccttttgtgtctggccacatttcacttagcataacgtctttaaggttcattcacgttgtagtatgtatcagaatttgagtctcatgagtgtgtaaatgctcggcattttattttattttattacctgttaagactgaatgagtttccattgtgtggatatatttcattttgcctcttgacttatcgttcggtggacttttgagctgtttccacattttggctattgtgagtaatgctactatcaacatgggtgtataaatatcttttcaaagccctactctccattattttgggcatatgaccagaagtggaattgctgcatcaaatggtaatgctttgcttaatttttttgagaaacggctctaccattttccactgtggctgcaccatttcacactcccaccggcaatgcacgagagtttcaattttcccacctcctcaaaatacatgttttgtgttttcttttttttctttaaatcaaagccatcctaacatgtgtgtggtggtgtatcactgtggttctgatttgcatatctctaagtattagtgatgtttagcatctttgcatgtgcttattggccatttgcatatcttccttggagaaatctctgttttagtcctttgcccatttttaaattgggtttctgggtttttgctgttgagttatattagttctttatatattctgagaattaatcccttatcagatatatgatttgcaaatattttctcccattccatgggttgccttttcactttctggataatgtcctttgatgtagagaagatcttattttttatgaagtcaaatttgtctgttttttttttgttgcctgtgctttgggtgtcatagccaagaaatcattgtgaaatccaatgtcatgaagctctccccctatgttttcttctaagagttttataggtttatctcttagatttaggtctttgatccattttgggttaatttttatatggtgttaatttttatatggtgttaagtaaagattcaactcatccttcttcatggatatccagctgtcccaatatcatctgttgaaaagaccatcctttccctattgaatggtcttggtacccttgtcaaaaataatttgactataaacgcaagcatttgtttctgggctctccattctattccattggtttctatgtattcctttatgccagtaccacactgtgttgattactgtggctttgtagtaaattctgaaatcaggaagtgtgagtcctccatcttcattctttcatattgtttggctatttagagtcctgagactccatatgaattttaggatttttctatttctgcaaaatatgccactgggattctggtagggattgcattaatattatcatcttaatgatattaggtcttccaatctatgaaaatggaatttctttccatttattaatatattctttaatttctttcagctgcattttataattttcagcttacaattttttcacctccttggttaagtatattcctaagaactttattctttttgatgataatgtgaatcaatttttttcttaatttcttttcagattgttcattgtaagtgcataggaatacaactgttttttggctggatgcaacggcttacacatgtaatcccagcactttgggaggctgaggtggtcagatcatttggggtcacaagttcgagaccagcctgaccaatatggtgaaaccctgtctctactaaaaaaaaaaaaaaaaaaaaaaaaaaattagccaggtgtggtggcacacgcctgtaatttcaactacttgggaggctgaggcaggagaatcatttgaactggggaggcagaggttgcagtgagccgacatcatgctactgcacttcagcttgggcaataaaatgagactctgtctcaaaaaaaaaaaaaaaaaaagagagagagagagagaaagagacagagaaaaaagaaaaaagaaatacagctgatttcaactgatttttgcatgttgatttagtatcttgcagttatactgaatctgtttattagttctaaaattttgttttaatctctagggttttctacatgtaagttcctgtcatctgcaaacaaagttaattttacttctttctgatttggatgttattttctttcttcttgcctactttctcttactagaactttcaatactacatagaatagaagtggtaaaactaggcattcttgtcttgtttttatcttagagggaaagctttcagtctttctccctggagtatgatgttagcgttgggcttttcagataatgcctttattatatttgaggtagtttccttctatttataatctgagtgtgtttactatgatagaatgttgaattttgacaaatgttttattggttcagtctccctagtagttattagtctattcagattttctgtttcttcatggttccatttggaaggttttatgtttctgggaatttatttcatccaggttctctaacttgttggcatataattattcataatactcataacacttactatttctgtaaaattggtagtaatcactttcatttctgatttgagtaatttctatcttctcattttttttcttagtcgatctaattaaaggttttgaattttgttgaacttttttgaagaaccaccttttggtttcattgcttttctctattgtttttctagtccactctaatctttattatttccttcattggctaactttgggtttcatttgtttttctcctatatccttaagttgtaaagccaggttgttgatttcagatctttcttctttttaaatgtatgtatttatagttatacatttcttgcacaagattgttaacttctctgagccttagtttccacaactgaaaattgcaataagagtgcctgtttcacagtattgttttgaagatttaatgtaataatcaatgaaacattcagcaaaatgccacatgcagaggaactgtttcataaatgttagctgctgttaaagctaccattattattagccttgaagtcaggtagtcttagaggcaaatcctagatccgcctgtcactagctgtatgacattgggtaagttttttcaccactctaagccacctctattttctacctgacagtattattttacagctcaaatgagatacatgtaaataatttaacacagggcctgacacataggaagcacccctcaacagtagctaatattagtgattattaatcatcagtctgagttgactgatgactgatgagaaattaagcccaaattattgcaacagaaataaagaagaaacagatgcagaaggtattatatatacatgtgcatatatatattcacatatatacacacatatacatatacatatacatatacatatacatatacatatacatatacatatacatgggagaaacaggcattacacaaaaagtccactgggacatggttactgattaatatgggagagggaaaagaacagagttaaatatgaagtctcaagcctagtatgttagttttcattcagagagatgcagccaagatgggattagacatgcaatataattttgagggaaaaacacctgtgagggaaagtgggctgggagggggaggagcctgggagagccctcagatcatgatgcagatgtgatgcctgtggaggagaaagagaaaaaaaagaaagttttagattgcagtgcagttcgaagagagtttctgcaagactgttgggaattcctcaagcccatcacctttcagagcaaaatagtcttgcagaacttgacttgctttcacacacctgctgggagcccatgggaagtgaggtctctgtgcaaaggaggtggtgaattcaaaatgcactaactgccacaactgagacactaagaaaaaaaatgcaaccatgaaaaagtgggaagttttaatgacatacaagattagcaatcagtctttctcaaatttcaaagccttcaaaaatatctgagtgtaaaaaggtcaggatggaattgacagaagactgaccatcaacctggaaacctggtgagataaaaaacctgcaagaatttagttggataatcatctcccagcaaccttcccacaaaaataatgtattccttgaaggaacaaatagaaacgacttcatgctgagagttggttcctgggggacttccctgtaaaataagatcaacttcattccttctcttttctttccatggcagatgagtcagtacaagcaagttcacctgacctctcagctgggaccgctgtcagcatcatgattggagtactggctgggatggctctgatatagcagccttggtgtagtttctgcatttcgggaagagtggtaggtattatgacctttcctcttatcctatttcctgcagggctgactgccatgcttgggagagggaaaggacttcttcacctgtatctgggactagatctcctcctcctcccactaaactcctgcttctaagcactaattcctgcaggtctcttcttccctggtcttcatgcttcctgtactccactgtctcttagacatgactactcccagcctctgctcatttgtttccccaattcaatacattgtgaaagcttcttggtcctttttaaaacatctttcacttgtgctgttctctccattcccataaacctcaacaactgcttgaagtcctgcttgacttcttttctctagtctgaatgcttcctagcatatgactacttcattaccttcctaaaatcacctactgaagaacctgcagcggcctactctagcccattagataagttcacatttcttctcttcatgaatcctttttacttcctttaccactactcctgagtataatttctccatcctaattagatctgtcttcctatacatcctgcccttccaccccatgtacacatagaattcttagttccaatgttatatctaaaaacaaggtaaccttcctccaccacctgcattgtggagttacccacacccttcatcacaagcaacctctgtccttgtggaggacaaagacggtagcattagtatgtgaacctgagactcaggacacaacctaaacgtggctgagaatcttttcctgataaccaattcatgtgttcatgaaagatacagaaatgaagaaggcaaggtccctactccagggaacataaagcctaagacagacgataagacaaagggccaggtgcattggctcacaactgtcatcccagtgctttgggaagccgaggtgggaggatcctctgagcccaagagttcaaggttggagtgagctatgattgtgcctctgcactccaacttgggccacagagcaagaccctgtctccaaaaaataagacatgaaaaataattgtaataccaaaatagaaaaagataaattccacaagaagaaagagaaatctaatgggaaatatggctacacactggaatcactggaaaatttttaaaagaacaactgatttccaggctctgctcatacattttgatttaatggtctagagtgggaccaaggcgttattatttaagccttcccacatgctactaatgtgcaagcaggatgcagaacccctgctctgataagcaggacttgggcttaaatcaatggtttgtagctaggggtatgtatcaaaattacctggggaactttttcaacatacataagcttatacattgttggccatatttgttaatgtactatgccctgaactcagtaatccagttgagaaacagaagcgagatggaaattcaccttaattgatatgttaaattatatggaaaacactgtcaaatgacaagtgatgccaaaccttctctaagttatatttgcgggtatgttattgatgtgaatgtttcaaaaattatatgagatttctagaaatctaatattttgtcagtcatagtgttacatgccacagaaataaccaaatttgtttgtgagtggtgtcattatcatcaaatctatcaaatctgaagtcttatcagatttttaaccattgccatcttaagtctttgtcattcacagacagttgttttgattcttctctaaaagcacttggaaatggttacagtccaaaactgcttcttttccaaggagatttatggctaagactctgacaagttgtcttgaatacaagtttctgataactttagaatcataccattgggctaagaatttccaaaactttaatgaagagatatcttcatgaaactgccaatcaagatcaggcagaacaaaaaattaatttcatgggactagatgaactaatgaggataatgtttttatgaatttttagttgaagttttgatgattctttaaatgttttgttttccaaatttgaaggaatatttttcttttaagctatctatagcttacagaaacttggtaaaatacaacttgtgaacaaaaattgaaacattaatttttctccctacattttccatccagaatcaggcaactattcatgggtgttcacattgttatgaaaatagttatttgcataagttcaataagaatctgttctgtttataacaggatacatttaaaaatactggttatattaccaaggctttggctgggatgtcatatttggaaatatacatagaatgaacccgtaggtactgaggtactgcaggcaaagtctgaagtcagccttggtttggcttcctagtgctgagaggtttctaaaactttaatctgagattccttatcaaaccttccagcaaagcaatcttaaaaagatgctatgtggtcaatcgctattcttgctatacttcttatataaagaatcagaccaagtttgatgagactctacctattttgtaaacagattagtcttactctgattaactttggtagaaacagggagagatagagaaaaattatgttcagaggaaagactataatacaactgttatcaaattgtagccctgtattttgttttcaagtttttattatccacctgcagactggactggattcttctagctccttcaatcccattttctcctgtggcatcactaagtataagacctgctctcttcctgaagacctataagctggaggtggacaactcaatgtaaatttcaaggaaaaaccctcatgcctgagatgtgggccactcagagctaaccaaaatgttcaacaccataactagagacactcaaattgccaaccaggacaagaagttgatgacttcatgctgtggacagtttttcccaagatgtcccaagcctcatcgtgacgaggctcttatcccactccatttttccctgctcatgcctgcctctttaatttggtaagataatgctgtaactagaatttcacaatcagcgccttgtgcaggtaatttgacagagtgttggatgtgtcatgtcatcatgtcaaacccaaatatttgacctaagggatcctttattctgcccagtggctaactttaacaacatccctaatacaactgtttattcaaatgcacggtggtccctgttagagttagacctctagactcacctgttctcacgccctgttttaatttaacccagctatgggatgccagataacagaattgctgcctactagctgaacagggaggagtttgtgcagttgctgacacttcttgttgcacataaataaatacagtgggtactatagagactcagttgcaaaaattaacaaatatgctgcttgattaaaatgggtaggcttctcatgtggctcattctttaatctattctcttttatttggtttggttcatggggtctctgcctatggatcatacttcaaactcttggtgtgatcctcctgattgtcacaatattagttaccctggtgtgctgtattctctaaaacctttaaatgtttgcatgcagccattcgtcaaatgtcaaatattctctctttggctggaatgacaaaaactcaaataaatgtatgattaggaggacatcataacctatgaatgatggaagtccaaaatgatggtaactgacagtagtgttaatgccttatgtttagtcaaactctcatttaggtgacagcctggtgactccagaatggagccagtcatgctaaatgccatatactcacactgaaacatgaggaagcaggtagatcccagaacagacaaaattttcctaaaaacatgagagtccaggctgtctgagtcagcacagtaagaaagtcctttctgctttaactcttagaaaaaagtaatatgaagtattctgaaattaaccaatcagtttatttaaatcaatttatttatattcttctgttcctggattcccattttacaaaacccactgttctactgttgtattgcccagtaggagctatcactatattttgcagaatggaaactgccctgactcatgaatcacaaataaaagccaattgtatct

SEQ ID NO: 757 - DNA, 65513 bp, Homo sapiens
tacagccccaaggtcgctccctctggggccctttcttccccattcttcccagcagcccaaagctctggtgggacaggggcagcccctggggagggaggagaggacccaggaacccggctaggagggtggcccacccatttccagtgtgacctgttcccattcccccatgtctcctcccatccctcccgccactcagctcaggctgatgagaagcagagcaacgggtgtatcggtgttttctttcctggtggggtagtggggtggggctgaggagagaaaagggtgattagcgtggggccccgccctcttttgtcctcttcccaggttccctggccccttcggagaaacgcacttggttcgggccagccgcctgaggggacgggctcacgtctgctcctcacactgcagctgctgggccgtggagcttccccagggagccagggggacttttgccgcagccatgaagggggcacgctggaggagggtcccctgggtgtccctgagctgcctgtgtctctgcctccttccgcatgtggtcccaggtaagtgatggagacagcagatgaggctggctgcggggagcacttgggggaggtgggagctgtcagagaaagaggtccggggagacagagagagagagagagagaataggggaaagggagacagcgaagaggaagagaagggagagaaaaagagggagagggaaaggagaaagagatgaatgggacaacatggggggaaggtggagagagacccagagagggaaagaagaggaagagaagagggagagagaaagaagagtggaggccgtgcgcggtggctcatgcctgtaatcccagcactttcggaggccaaggcaggagatcacctgaggtcaggagttcgagaccagcctggccgacatggtgaaaccccgtctctactaaatatacaaaaattagccggtcgtggtgggccccacctgtaattccagctactcaggagtctgaggcaggagaatcacttgaacctgggaggtggaggttgcagtgagccaagatcgcgccactgcactccagcctgggagagagagcgagactctgtctcaaaataaataaataaataaataaataaataaataaataaataaatataaaataaaataaaaaataagaagaggagaaaagtggggaagaggaggcatgaactggcagatacgggacaagatctgaggggaaagacagagggagaatgctcgaaagagagagaaaagagaacagagggccagagagcagcccggcgatgtctggaaggatccatggtgagagcccaggcttactcgcagagagaaagacaggcagagccagagcaagaggaacagagtcaaggagaaagatgtacacccttgtgtacagagctgggggtagaggggatgccaggaaagctgggtgatggagacggaagaaaactcatgtaaagctgcagggtgagaggacgagacaggtgagacgcagacaaactgaggaccctgggaatggagagaggagaagatcgggagacagcagcaagcaagggaagcgacaaggaggagaggggcaggccggccgggagggtggtgcggaggaggcggccagggcgcagagggccgggaggtgctggccgtgggcttcttacctctgagctcgggtttaaaagcctccatttgggtcacggccttgcctggggctcgtagccccggcattggccttgggctcctccgtgtacagagctgggaggggagggatgccaggcctgtgggagatgttccctcgggggcccccgtcctcttccccacactttccaggctgtccctctggcttcaggaccaagttttattctgtgtttctgggtgtctgagtctttgggggagagtctggggtccagagttcaagctggggttagagtctcagctcctgccctgcctctcagcaggctaagaacagtcgccgagggaaaatatttcttgggcgcatatttgaggagcttcctgggagtgagtcagaaggcgagtgccgtttaaaggctgcaagagaagccatgctggtgaagcggacccttccacctcgggatgtttcaggactaggctgagggcaaaggaaactgccaccacctccctacacctccccaccctccagcacccccaccccaccctggccacacaaccccgctccagtgctcatcccaccgtgaggacgtggaggccggaaggagccgccacacggccctgccctgcagatgtggttgaaggagtctccacgggaatcatgactcccagagcgaggctggggcttggggcgccggggaggcagcttggatttaggagccccagggccaagtctttgccgtgaactgttctggcccctgtgaccaggccctgccccgtgtctccccagggccccggtcccctgtgtaaaaagcagtggtgaacggttggacctcctgacgcccaagttcttgagtttccaaatctgtgatttaaagctgagcccaaatgtgctgggtaccagctggacactcagctccatgtggagccaggaagtggggtctgtggagaggagcgcagaggggcaagacctggggtgggcgtggaaaagcacgggggcgtgacccggagaaggagtgaaggactgttggtgtgcaagggcgtctccatgacgacccgaagaagctaggcatgtcgtggagcgctgagtcctttgcgtcgctaaggggaccaagtggagctgggccaggagaggagatggtcgtggctgggagatggcacccacacatctgaccgggcatgaccagggccttggcaggaaaagcagtcaccaagggcgggtgggcagcccccacccccacagggcagctgctggaggactggcagccagccagccccgttccttttggctccctgaaggggtttacagatgacctgcctatacttgagtctagggtctgtttgcacacttgccggcaggaccctcacccaggctgggtcacactgaagcccaggccagaggaaaaacacagggtttccacaaaggagctgccgcaatgagggtttccttaaggaacagccctggctctcaagggttaaaggataaggcacagcagacagaggtgggctagacaaggacagatggaaatttggtgtctactggtcgccccaggcaggaatgactcagaaggaagcctggccgtcctggttccatgccacagggaaaggcaactgggtcgaaataggccttggtctccagcactatcagtgaccccagggaggtgacaggctggagcaagtgcagggcaggcaggggaggggacgccggccacagcgcactccacggggaagggtctttatgggcccctcctcggagaacccccggtctatctgtcagtctgggacaggccacctcaacttgccaccgaggacaccaaaactctccacagacccctctgcccctctgggaaaccccactgtgctccaggacactcaaaaggaaaggatccctggacaagaggtcctgccaggaacatcagccaaattttggccaacgaccagcaaggtgcacagggaagagcaggggctgaaactcagaggtccagcatcagcgacgcccttggcagcccagggaacacaggcaacgccttttggctctggagtcttaggctcttcatcggcaaactgagcccagggggaaggggctactacgtagggttgtcatgaggatgaaacgagacagcatctggtgtaaagtagaaaaggcataaagggccgggcgcggtggctcacgctgtaatcccagcacttttggaggcccaggcgggtggatcacctgaggtcaggagttcaagaccagcttggccaaccctgtctccactaaaaataaaaaattttgccgggcgtggtggcgagcgcctgtaattccagctactcgggaggctgaggtaggagaatggcttgaacctgggaggcagaggttgcagggagccgaaatggcagcactctagcttgggtgacagagcaagactctgtctaaaaaaaaaagaaaagccataaagacgtgtttgagaaagaggcctgggaagacgggggaaggagggtgattgaacccggaatggcacttgtgtcggcccagggtcatatcccttcatctaaggatcctcgtgcctctaaaaagccaccccgtgcttcctgtgggtttgcaagggctggcttggtgtattcagaatgtggcttgctgcatgaacggaccccgagggccatggccctagagcaggggctcgctccagcggacagctctgcctcaccgctccctgcctgtgagtcccgccacgcccttggtttctgggctcagccgtggaggcagaggctggcctggcagaggctggcctggcagtgcttgacacgcaagtgatttgtgtcttcattgctaaggacaagaggcaatgagaggacaagaagtggttggccttttgtacgctcaacgggtggttttgctactctgtgtcttttctctgatttcacggtgctgttaagtgcttaaaatatgcacatcgtgtagctcacagagccacttctctgaaggccaggacagagaccttataggctctctctccccctagtttcagccttttaccttaaatatacgtctttcttactgctaggctgagttcccgccccagcatgttctgagaaattgagtcaaaataactgagtctgttggcacctcatcgacgatttcttcatagacggtttttttattgttgctgttgttgttggttttttgggtttgtttgtttgttttttgagacagagtttctctctgtcccccaggctgcagtgcagtggcgtggtctcagctcagtgcagcctctgcctcccgggttcaagagattctcctgcctcagcctcccgagtagctgggattatagacgcccaacaccacagcggctaatgtttgtatttttagtagagatggggtttcaccatgttggccaggctggtctcgaactcctgacctcaggtgatccgctcgcctcggctcccaaagtgctgggattataggcgtgagctactgtgcctggccctacttcatagaggtttaaatgccttttcacccttttcctggagactctgaagaagtctcaggaactgggcatttgtgttgcacgtgaggccttgcaatggcggccctgcttggaggaagggcactggcctgggttgcccgcagctccactccccgtgtatgtgtttagggaccacagaggacagacatcgactctctgtagagatgccgccccgcccaggttgcagtttaggttccaaaagtccagtggccagtggattttgggggaatttggaataagaaacagcctagactttggagttgttcattcacttgcagaatttctactcatgccagctgctctggacaggaagatgaatgcgtcacagttcctgcttttcaaagctctctaagttaagtgacttgtttaagatcatagaacccataagtgaggcagctgggactagaacccaggtctcctgactcactgcagcacacagcctttcggcaatctccaaaccagcccagcccaccgacggagggaagaacagaagcattcacacaccctgctgagacagccattcattcattcatttgttaattaaaccaccatttaggaaacgcctgccttaagttcctgacattgttctaggacacagcactggatgcacacagtgaagagtgaaacagacgtggcccagtctcttggcactaaaatcttggtgcagacagacatcaaataattacggaaatgttctcaactgcacatgtggtaaatgcagtgtggaaaagtacagggtgtgctgagagctgcatttcgaatggccagagagtaggggaggtgcatctgactgacaagtcaggaagggccctgtgaggaaccgttctgcggggagctgaggcctgaggctgaggacagccaggtggagaaggtgccaggcctgagcaggcagaggcggagctcatggagaggcaggaaagagcttggccccttggaggacttgaaagagaaggcaggtgttagatcgcgcagggctttgcaagctgtggaatagattatgaattttatgttattttatttatttatatttttgagacagagtctcactgtgtcacccaggctgaagtgctgtggcgttatctcggctcactgcaacctctgcctccagggttcaagggattctcgtgcctcagccccccgagtagctgggatcacaggcacatgccaccatgctctgctgatttttgtatttttagtagaaatggggttttgccatgttggtcaggctagtctcgaactcctgacctcaagtgatctgcttaccttggcctcccaaagtgctgggattaccagtgtgagccactgcgcccggcccagattatggattttgagtaattgaaatgacagacaaggccaggcacagtgactcatggctgtcatcccagcactctgggaagctgaagcgggcagatcacttgaggtcaggagtttgagaccagactggccaacatggcaaaaccccgtctctactaaaaatacaaaaattagcaggagatggtggtgggcacctgtaatcccagctactcaggaggctgaggcaggagaagcacttgattccaactgggatcacaggcacacaccaccacaccaggacagcccgaggctaaccactgtggagaggcagccaggctcctgaggacagcgctaggctaggaggatgtgcctgccccagtgggagccaggagagatgggtggcaacaccaagatggtggagactggagatggcacctccgagaaggaggcgttggggaaaagagagttgagctggccggcgtgctgtgctcacagccggattttggtgcttcttggtttggtgctggagcttctgtggcgatcaccagagtggctgggtgctgccacaccagatgctgacagaaatgaggtcaaatgaccggtggtgggatccatgggttggggtgtgacttcggcggggatcgttggaaagaacgggtaaagttctcgccttggagtccactgtgaagggacttgaacctgggaggtggaggttacagtgagctgagatcgcaccactgcactcctgcctgggcgacagagcgagactccatctcaaaaaaaaaaaagataaagataaagaaacaggcaacgtcaccctctctccagcctcggctgaaggcaacaaaggccacagggcctgggatgtattccacagatgtgtacgaagtcactgctgtatgccaagtctcgtttcaggcgctggagatcacaagaggtctgttattccaagggtatcttgagttagtgtctttcctcatcttgaattctagggaagtacccagtggacacaaccctggtcacagttgattctgggctgatacacaaatagcattagctccctgccaaaggcggtggggccagcggttcagcgtctgcgcgccttccgggccgcctgctgcctgtgtggggctgaatgttctcctcaaggccatccttaccgttgggcacttcccttgggcttacactgccctgcccgaggcagcctggcaaggggccccacccgtcaggaagtaattcccctccaggaaagtgaaacactgtggcgatacggcttacgggttcctcacctccagttccaggaaaaacccaagacaaacagaccagatgctaggaataagcctcaacccacagcacttagaaagccgcaggctttgtgtgtcttcagggagtggcttcacccttcttggaatctgtcttctgccagcgtcactcatactgctgccactccttctcccgagccaacagcacacctgtcacctcggcacacctgtggagtcaccagaggggccatctggggaaaacgatgcctactgccactcggccttcacatcctggagccctaacagacgtgaggcagctgtgggccgtctcccacctgacgtggttcaaggagagaaaagaactaccttgatgggagatctctggctgacgtgatggcagaggcttgacagagccttcaaggactcagatgtggggaacgtctctacctcagtgccaacgccagtgccctcctcgtccctggatggagactcttcctctgagagaatgtcttaaaaactatccgttttactcaatgacacacgtgtgtcttctcacagtgatcttgtcaccttaaggtgtcaacagccttcacactcactctaacatcatcccagaaaagagacaccaggaacattgcaaaaacaccccagtgtcacagcgtccaccccgagaatgtgcctggctcggcctcaggctcagagccctctgcatgtggcagtccaagaacttggggcaggtcagtgaccatttctccatctttgcctcagctctccatccactcggtggcagtcccagagctgagcagctcgcagcttccgagcaatggctcttaccccgagcccccggccctgctacttccaaggcatataatatcactcggtctcttcaaatctcaatttccctgcctgtgaaatggggccgctgaatctcgatttccccgcctgtgaaatggggccgctattaacaagataagctataaagcaccacatgaacatgagctgtgaacatttgtattattcatagagtcataacgtgcctacgagagaagtaaaaagaagccccacctccctggtgtgttcatcacaagtcagctgaccctcagtcactcgacccagcgcagatgcggaggctctcgctgcttgcagagagtttatattatattaaacggatagtttaattcataaggtctggtaggaagaacgtgaatttattaaccaaaactagtaaaggggaagcagccagatttctacttaaagtagctgctttaattttcagaggggaaagccttgataaggaaggcacgcaagaatcgggctgagtcctgtgtccgcatgtcttgttctggtggctcttctgggtcccagtccgtccggacctctggctgacattattttaacaagagctgtcttgaagtaatttctgggattttgcagctggattttcagatgtggtttgtctctctcaaggttttagcccctgcaacttttaggaagacatataattcgatcctcgcacgcagagaaatggaagggagtatatacagacagtaagaaaagggagggagtgtatacagatgacaagaaaagggagggagtgtgtacagacggtgagaagagggagggagtgtgtacagatcgtgagaaaagggaggggcgtgaagtctatttttaggctgaggaaaacggcctttgcagctgcctcaaggttgtatttggaaacccaagagaaaggggaaaacatgtttaaaatgcattttgaatttaagctgccggctacaaaactgaacaatgtctcccgcagaaacgagaaatcccttggcgtggccatttcttattacagaagccaccctgccacgcacacagacgcgctggaagtatctttcctcagtcacaaccagacgaaggtcattcttgcccagtggcctccctctgaggattctggtttctgacatccgtgtcacaatggcaatgccagtcaccagtctctgaccactagacccacgcccccgggacctacgcagacacccaggaccaatgccagtcaccagtctgtgaccccaggacctaccagacaccttccagggcaggcagggcaggccattttccaaagcaattcgagctaaggagacagcagcagcaaccctccctcctggccctcagagctgaggatcaacccacaggggtgcggtggaggctgagagcaggggtgcggaacccgagtcagcaggggcagtgaggaggctgccgcagtagtcaaagcgacggggaggatgtggcaaagcaaacaagaggacgcgatggggtgaacacttgggaggaagatcaacgagtactgactaggacacaggggacaaggaagagaaagaaatccagaggacccacagctttctgggctggatgtctgggggactgttgttagcatgaacagaaggaaggaagaaagcttgcaaggaaagattgacctggacctgttgcattgcatgagctaggcaggaaatccctgggagggtgaggccagcatatgggtgggaagtcagggagaagtacagatttgtaaggcgtgagagtagacgcagggtggccagagagggaggggcagcaggagagggaaagggctggagacatgtcatctgggcgtggagcgggggagagaggtggcaaggggagtggagtggagggcccgggagcgtggacggtggagcaggacccgtcagcttcaatgagggtgaggctgggtggtggcacggggccgccggccagggagagcacgtggaggggggggcgcaatacacatctgtcagattcatgaatgaatgaatggatggggccgaactgatgagacgcgtgaggactggagaaaatcgtttttgctgttgggaaggagattctggtagctctgaggaaaacggcttgagcgaagtgagtgaggtgggggcagagcgagcagtgcgtggtaaagaagaggcggcaggggaagcccggctttcatgctgctggagggacgaggaggacacagacggatgacagacttgttttaggccaacagacacctgaacatgctcacaggcaggagagaaggagaaaggcagaaagaacgtcggagacacagaggcagagcagtgagccatccgggcaggagggagccccggggccccggggagggtgcggagaaggctctgggcattgaaggagatgaagggcacggctttggttctttcagtgaagtagaaaatggagggtcacggggagagaagagagaggagagacctgtttctctccaatatcaactctttaggcgcaaatctcccagctctctgctccccaagtttatgcgtttggccagagtgagaacaagtttcagttgtctgacaatctgacggaacctgaagggcctgacttgcatcctggtgagagccaaggtcagttcattctggccaacacttgagcagcaagaacaaggctatgagtattttttagaataaaacttgatcaaggcttcaaatttctctgcctgacaacttcagcgagatggttttggcttacaaacattgttaagagtggatactatcattttattttaagggaagtgtttctgaacgtggggtccacggaccacctgcatcagaatcactctggacatgtgttaaaatgctgatgcaccctctgccttttgagaaccactttttttttttttttttttttcagagaaggggtcttgagctattgcccaggctggtctcaaactcctggcctcaaggaatcctcccgcctctgcctgtccgtgctgggattttaggcatgagctaccatgcccagctgagaaccattttcttaccaaaaatcattctccatagtctctccatccactaggatttctttctttttcttctttgtaaagataggtcatacttgaacacaggatttcttacctacaaataacctactcaagcttagtagattgagttatctgcaaattgttttcctaaacagctgaataatcaatctattgcaggagtggcttcagaggtattgtttaaatgatggtgaaagacaaatgcaataactgtagttttgtcgtaacgaatgctaatctcttcctcctcacaagcccaacagattgagagattttgacagcgccttctcccctagacaataaaactatgtcctccacatgcagtgactcacttgccctcctatttgcggcagcaggaaactctaatcaacttggctcaagatgagcaagttctctaaataaagatttaaaaggaggactaccaggacacagccctgtttagcaagaattttttttttttttgagatggagtcccgctctgtcgcccaggctggagtgcagtggcgcgatctcggctcactgcaacctccacctcccaggtttgagagattctcctgcctcagcctcctgagtagctgggattacaggtgcacgccaccatgcctgggtaatttttgtatttttagtagagatggggtttcatcatgttggccaggctggtcttgaactcctgacctcaaatgatccacccgcttcgacctcccaaagtgctgggattacaggtgtgaggcaccgcacctggccgattttcagtcgatgctgtgaagcaaagagcagcaggtgagggatggggcctgtcctggatcatgcccctttgttcacaggctagggatatggggaaacaggcacactcttgcacactgccaacaggtctgtaaattggcataagctttctgcaaagaaatttggcagtctgtattaataacatgaaaaattttataacggcataaaccagcaattccactgatagaaatttatgttaaggagatgagctgaaataatgtaaacaaaacattagacacgaagatagtcatcagggctttatttaaaataagcaatacattggaaatatcctaattgtccaacagtaagttaacaatatgagctttctctatgatggcttattatttagtgtttaggccgggcgcggtggctcacgcctgtaatcccagcactttgggaggctgaggtgagtggatcacctgaggtcaagagtttgagaccagcctggccaacatggtgaaacccagtctccactaaaaatacaaaaaattagcctggcatggtggcacatgcctgtaatcccagctacttgggaggctgaagcaggagaatcacggaggtggaggttgcagtgggccgaaatcgtgccgttgcactccagcctgggcaacaagagtgaaactccatctggaaaaaaaaatgtttaaaggctatgtccaatgttccataagggcagggacacacacacacagtgtcacacacacacacacacacacacacacacacagtgtcacacatacatactagcaacacacagaacgggcataaagtaagatgtattaaggagaaattgcgagcagggagcagtggagtccacatgacccccgagctctcattgcacagagaggtgggtatggtggacacacagcaggatgtggtacaggagagagacctgctcctgtttaacagaaaatgggaagggtaacaacgcttccagttgggggagtggctttgttaggaaggaggccaccagagctcagcagggggagtttttatacagcaccctagattttactatggagctgagctctcccagtccccctgagccagctcttgtaggactccaaaagggggaagcaaggaactgccatccaagacataaaagatgtgcgtcttctcaggctatgtttacgaagctagtatcttgaagaaatgctcatatcaggtatggctaaaaaggcaggatacaaaattatgtatactgaataagttaaactatacatatatattttttaatttttaattttttttttgagacggagtctcactctgtcacccaggcaggagtgcagtggtgcaatctcggctcactgcaagctccgcctcccgggttcacgccattctcctgcctcagcctcccgagtagctgggactacaggcgcccgccaccacgcccggctaatttttttgtatttttagtagagacgggggttcaccctgttagccaggatggtctcgatctcctgacctcatgatccgcccacctcagcctcacaaagcgctgggattacaggtgtgagccaccacgcctggcctaaactatatattttttaaagcataaaaacatcctggaaggaagcattgtctggtagcaagattatgggttttgatctttcaactataaatgttcccaaatgcacgtaaccagtatgtgtgttttctttggcatatttcaatgcagttgtacaattttgtccataaagattaagcacatcttttgttagatttatttttatgtactttttttggtcaccatcataaacactatagtcttaaaaatattttctctttcactgatatataggaatgcagttttattttgtttttaaatctctttttgagacagagtctccctctgtcatgcaggctggagtacagtggggtgatcatagctcactgcagcctcgaactcttgggctcaagtgatcctcccccctcaacttctgagtagctggaactatatgtgtgtgctactatgcccagctaattttttatttttttattttttatttctgtagagacaggatcttgctatgttacccaggctggtcttgaactcctggcctcaagtgttcctcctgcctcagcctctcaaagcactgggattcaggcatgaatcaccacacccagctggaatgcaattatttttaaaattttgattatggatatagaactttgctaataatgtatatgtttgggaagtttctatgtaaacaattatgttatctgcaaataaccataggcttgtttcatcccttccatacccaaaatcacatttctgtactctcatactttttgtttaattttctcgtcttatttcaccagctaaaaccttcaacctaatgttgattagaagcagtgattgttggcatcttgtttttattcctgattttacagaaacgtttctattgttttaagtataatgtttacacggggttataattgacattgtttatcaggttaaaagagttaacgtctctttttagtttgctaggagttttaacaggagtaagtgttgacttttatcaaataactttcctgtatctgctgtggtgattgtgtctcccctccgttctgtttatatggtgatttacattaagaaagcattgtctttatcttgcatttctgatttaaactcagcttgatcatgatgtacttttaaaatatttatttatttatttatttatttaagatagagtcctgctctgtcaccaggctggagtgcagtggcacaatctcggctcactgcaatctctgcctcctgggttcaagcaattctcgtgcctcagcctcctgagtagctgggattacaggtgtgtgccaccaagcccagcacacacctgtaatccaaaaaaatacaaattttttgtatttttaccagagacggggtttctctaggttggccaggctggtctggaactcccggcctcaagtgatccgcctgcctcggcctgccaaagtgttggggttacaggcgtgagccgccgcgcccggccatgatgcactttggcttgctaatattttatttacgatgcttccatgtattattactgggacttattaatctatagtttgtctttcttatcctatctttggtttccaaccttataaaattattagtagatcatttcctcctgttccaaactctgaatatgtttgtatagaattgaaattacctgttccttgaatgtctgatttgcctgtaaactcatcttagcctgcatttttttgtggggtggatagattatatatacatatttttttttgagacggagtctcaccttgtcacccaggctggagtgcaatggcatgatctccgctcactgcaacctctgcctcccaggttcacgccgttctcctgcctcagcctccagagtagctgggactacaggcgcctgccaccatgcccagctaatttttttttcaccgtgttagccaggatggtctcaatctcctgacctcatgatccgcctgcctcaccctcccaacgtgttaggattacaggcgtgagccaccgcacccggcctagattatattttttaaactgctgattcaatttaaaatagtttatagtggccgggcgaggtggctcatgcctgtaatcccagcactttgggatgccgaggtgggtagatcacctgaggtcaggagtttgagaccagccaggacgacatggtgaaacccagtctctactaaaaatacaaaaattagccgggcgtggtggcatgcgcctgtaatcccagctacttgggaggctgaagcaggagaatcttgaacctgggaggcagaggttgcagtgagctgagatcatgccattgcactccagcctgggcaacaaagcaagactctgtttcaaaaaaataaataaataaaattaaataaataaaataaaatagtttttagccaggtttttttcttaattcatttttgataaattatatttttaaggacagtatatccaatttatctaagttttcatactttttggtataaattcatcagagcactgtctcttaaattttttttctgaagttatgtacccttttttgtttctaataatcttgatatctgtgtcttttctgtctctctctctccctcctcccacccccctcccccactttctttctcttgccaggtatttgttttattttcaaagaactaatctttggcttcatttattccatttttaattgtttctatagtgagttctggtctgttactatatccttcattctgcttcctttttcttttttcttcctggtctttctagtctaccttttttgctggcggttccagctttttgcagggaaactcagttcagtgtcgtgaccgagggtcttgcttcctttcctttttcagcctttcagtcagcacatttccaagggcattgactcaccatcttagttgttaacttcttcactcctgagtgtttccctttctttcttctcatctcacctctgcattagaaaacatttattacatttataacctgtatttatctggcattggctggttttgctattagaggcttatctcttcttccatattgctgaaatggagctgtgccacttttataaagaactacaaaaatctttactttaaaaaaaaggacggtgctgtcatgaaacttctgctgctgacactgattttagcagaggtgatgcaggctctgaaaagatgttaattgccaagaatttacacattcagaaagtttggcccctagatagctcctgtctactcaaagcctgatgatagacaaatgctcttaattatgttatcagggaaatgaaataaggttaaaaataactgcatagagaatgtttttaaatttaaaccttatttggagaaaccaagttttgcaaattttctctaggagaaagcaggcatcgagtttagagtcctatcaacaaatctcaacctaattccaactaaaggaagtttccgtttaaagttgaagtggagtcattttggattaagccaggggcccagggacctcccagagggctctgcggttcagcccgtgcctttgtccacgtcggtttacaagtgtgtcaccagtaagcagttactattaatgaagtgcagaagcttgcacgtgagtcacttttttaacaattagagctggttcataaccattatcactcacttgagagtctaagttactgtctgaagaagagaaggtggcgaattacagtcaattccagaaagtggacttgaagctgaattcttccctgagactttgtctctctgagtatcatcttgccaactatctaggagcactgaggttgaaaaaaagggtgggagcggtggctcacacctttaatcccagtactttgagagtctgaagcaggaggatcgcttgaggccgggagttcgacaccagcctaggcaacatagcaagattccacctctacagaaataaaaaaattacccaggcatggttgtgtgtgcctgtagtcccagctactcagaaggccaattacaccgctgaacttcagcctgggtgacagaagaccctgtctctctttctctctctctctttctttctctctctctctctttcttctctctctctctctctctatatatatatgtttaaaaagaaaaaagaaagaagtttgagaacagctagggaactaatgaaaacccaaaagagtcagtttctaagagaaaaaaaaaggcaagttttcttggtttcttcttggttcagagactcagaggctaaggtaatattcacgaagatggtatgtggctagtgcaggtgctgtgaaatattttaaacaaaaaaagccaatatttaaacattctgcctgggaaatatttttctttatttatttaatatctatttttattattattattattatttttattttttaagacacagggtctcgctatcttgcccaggctggtctcaaactcctggcctcgagtgatcctcccaccttggcctcccaaaatgctgggattacagacatgagccaccatgcctggcctctgcctgggaaataatttttttttaaaaagtggttatggtcaataatattagcttcttggtagtctgtgaccagggcaagagtatatgcatttaccccttgggttttttaccagattggcacagatgttaacaacgaaaaagaaaagtagaaatttaatttatttttaagaaagataatgctataattcaagttgagagagttaacccggcttatagcaggggtactgtttgcctcttcccatggagtttaacacagttaattcaccattctagtctaacctcaccttcctcctcacaaggaagacaggcgggagctggagaagaccattggctatattcctgcaactgtgctttttctaggcgatttgaagcagtgcttatcaggggccttcctctgtgggaatcctgcacccccatctctctctccttttttattttatttatttattttttttttgagacagaatcttgctctgtcgcccaggctgcagtgaagtggcatgatgtctgctcactgcaacctccacctcctgggttcaagcaattctcctgcctcagccttttgagtaactgggattacaggcacccaccaccacgcccagctatttctgtatttttttttctagtagagacggggttttgccatattgcccaggctggtctcgcactcctgacctcaagtgatccacccatctcagcctcccaaagtgctgggattgcaggtggggctaccatgcccggccccatctcttattatttttttatcccccaaatatgtacagttgtgatatattaatttttcattttttctttttatttcttttcatttttactttaagtttcaggatacatgtgcagaacgtgcaggtttgttacacaggtatatatgtgccatggtggtttactgcacctatcaacccatcacctgcatgtattagctatttatcctgacgctcttcctccccttgtcccgtccctgacaggcgccagtgtgtgttgttcccctctctgtgtccatgtgttctcattgttcaactccaacttatgagtgaaaacatgcagtgtttggttttctgttcccctgttagtttgttgaggatgatggctttcagcttcatccatgtacctgcaaaggacgtgatcccattcctttttcatggctgcatagtattccgtgctgcatatgtaccacattttctttatccagtctatcactgatggacatttgggttggtttcatgtctttactattgtaaatagtgctgcagtaaacatacgtgtgcatgtatctttataacagaatgatttatattcctttgggcatatacccagtaatgggattgctgggtcaaatggtatttctggttctagatccttgaggaatcgccacactgtcttccacaatggttgaactgatttacactcccaccaacagtgtaaaagcgttcctatttcaccacagccttgccagcatctgctgtttcttgactttttaataattgccattctgagtggtgtgagatgatatccctttgtagttttgatttgcatttctctaatgatccatgatgatgagccttttttcatatgtttgttggtggcataaatgtcttcttttgataagtgtctgttcatatcctttgcctgctttttgatggggttgtttatttttttcttgtaaatttaagttccttgtaaattctggatattagacctctgtcagatggttagattgcaaaaattttctcattttgtaggttgcctgtttgctctgatgatagtttcttttgctgtgcagagctctttagtttaattagatcccatttgtcaattttagcttttgttgcaagtgcttttggagatttcatcataaaatctttgcctatgtctatgtcctgaatggtattgcctaggttttcttctagggttttcatggtttggggttttacatgtaagtctttaacctgccttgagttaatttttgtataaggtgtaaggaaggggtccagtttcagttttctgcatatggctaaccagttttcccagcaccatttattgaatagagaatcctttccccattgcctgcttttgtcaggtttgtcaaagatcagatggttgtagatgtgtggtcttatttccaaggtatctattctgttccattggtttatatgtcagttttggtaccagtaccatgctgttttggttactgtagccttgtagtatagtttgaagtcaggtagcctcccactttgttctttttgcttaggattgtcttggctatttgggttcttttttgattccatatgaattttaaagtagtttgttctcattctgtgaagaatggtagttttcacatcctttgttagctgtattcctaggtattttattctatttgtagcaattgtgaataggagttcattcatgatttagctctctgcttgcctattttggttcactccaggaaccacagaggacacattaataactggaagtaaaactgctgccccagtcacctcaacaggctcaacaacagcgacactagagggacaatcaactgcagcttcttcaaggacctctaatcaggacatatcagcttcatctcagaaccaccagactaagagcacggagaccaccagcaaagctcaaaccgacaccctcacgcagatgatgacatcaactcttttttcttccccaagtgtacacaatgtgatggagacagctcctccagatgaaatgaccacatcatttccctccagtgtcaccaacacactcatgatgacatcaaagactataacaatgacaacctccacagactccactcttggaaacacagaagagacatcaacagcaggaactgaaagttctaccccagtgacctcagcagtctcaataacagctggacaggaaggacaatcacgaacaacttcctggaggacctctatccaagacacatcagcttcttctcagaaccactggactcggagcacgcagaccaccagggaatctcaaaccagcaccctaacacacagaaccacttcaactccttctttctctccaagtgtacacaatgtgacagggactgtttctcagaagacatctccttcaggtgaaacagctacctcatccctctgtagtgtcacaaacacatccatgatgacatcagagaagataacagtgacaacctccacaggctccactcttggaaacccaggggagacatcatcagtacctgttactggaagtcttatgccagtcacctcagcagccttagtaacatttgatccagaaggacaatcaccagcaactttctcaaggacttctactcaggacacaacagctttttctaagaaccaccagactcagagcgtggagaccaccagagtatctcaaatcaacaccctcaacaccctcacaccggttacaacatcaactgttttatcctcaccaagtggattcaacccaagtggaacagtttctcaggagacattcccttctggtgaaacaaccacctcatccccttccagtgtcagcaatacattcctggtaacatcaaaggtgttcagaatgccaacctccagagactctactcttggaaacacagaggagacatcactatctgtaagtggaaccatttctgcaatcacttccaaagtttcaaccatatggtggtcagacactctgtcaacagcactctcccccagttctctacctccaaaaatatccacagctttccacacccagcagagtgaaggtgcagagaccacaggacggcctcatgagaggagctcattctctccaggtgtgtctcaagaaatatttactctacatgaaacaacaacatggccttcctcattctccagcaaaggccacacaacttggtcacaaacagaactgccctcaacatcaacaggtgctgccactaggcttgtcacaggaaatccatctacagggacagctggcactattccaagggtcccctctaaggtctcagcaataggggaaccaggagagcccaccacatactcctcccacagcacaactctcccaaaaacaacaggggcaggcgcccagacacaatggacacaagaaacggggaccactggagaggctcttctcagcagcccaagctacagtgtgactcagatgataaaaacggccacatccccatcttcttcacctatgctggatagacacacatcccaacaaattacaacggcaccatcaacaaatcattcaacaatacattccacaagcacctctcctcaggaatcaccagctgtttcccaaaggggtcacactcaagccccgcagaccacacaagaatcacaaaccacgaggtccgtctcccccatgactgacaccaagacagtcaccaccccaggttcttccttcacagccagtgggcactcgccctcagaaattgttcctcaggacgcacccaccataagtgcagcaacaacctttgccccagctcccaccggggatggtcacacaacccaggccccgaccacagcactgcaggcagcacccagcagccatgatgccaccctggggccctcaggaggcacgtcactttccaaaacaggtgcccttactctggccaactctgtagtgtcaacaccagggggcccagaaggacaatggacatcagcctctgccagcacctcacctgacacagcagcagccatgacccatacccaccaggctgagagcacagaggcctctggacaaacacagaccagcgaaccggcctcctcagggtcacgaaccacctcagcgggcacagctaccccttcctcatccggggcgagtggcacaacaccttcaggaagcgaaggaatatccacctcaggagagacgacaaggttttcatcaaacccctccagggacagtcacacaacccagtcaacaaccgaattgctgtccgcctcagccagtcatggtgccatcccagtaagcacaggaatggcgtcttcgatcgtccccggcacctttcatcccaccctctctgaggcctccactgcagggagaccgacaggacagtcaagcccaacttctcccagtgcctctcctcaggagacagccgccatttcccggatggcccagactcagaggacaagaaccagcagagggtctgacactatcagcctggcgtcccaggcaaccgacaccttctcaacagtcccacccacacctccatcgatcacatccactgggcttacatctccacaaaccgagacccacactctgtcaccttcagggtctggtaaaaccttcaccacggccctcatcagcaacgccacccctcttcctgtcacctacgcttcctcggcatccacaggtcacaccacccctcttcatgtcaccgatgcttcctcagtatccacaggtcacgccacccctcttcctgtcaccagcccttcctcagtatccacaggtcacaccacccctcttcctgtcaccgacacttcctcagaatccacaggtcacgtcacccctcttcctgtcaccagcttttcctcagcatccacaggtgacagcacccctcttcctgtcactgacacttcctcagcatccacaggtcacgtcacccctcttcctgtcaccagcctttcctcagcatccacaggtgacaccacccctcttcctgtcactgacacttcctcagcatccacaggtcacgccacctctcttcctgtcaccgacacttcctcagtatccacaggtcacaccacccctcttcctgtcaccgacacttcctcagcatccacaggtcacgccacctctcttcctgtcaccgacacttcctcagtatccacaggtcacaccacccctcttcatgtcactgatgcttcctcagcatccacaggtcaggccacccctcttcctgtcaccagcctttcctcagtatccacaggtgacaccacgcctcttcctgtcactagcccttcctcagcatccacaggtcacgccacccctcttcttgtcaccgacacttcctcagcatccacaggacacgccacccctcttcctgtcaccgacgcttcctcagtgtccacagatcacgccacctctcttcctgtaaccatcccttccgcagcatccacaggtcacaccacccctcttcctgtcaccgacacttcctcagcatccacaggtcaggccacctctcttcttgtcaccgacacttcctcagtatccacaggtgacaccacgcctcttcctgtcactagcacttcctcagcatccacaggtcacgtcactcctcttcatgtcaccagcccttcctcagcatccacaggtcacgccacccctcttcctgtcaccagcctttcctcagcatccacaggtgacaccatgcctcttcctgtcactagcccttcctcagcatccacaggtgacaccacccctcttcctgtcaccgacgcttcctcagtatccacaggtcacaccacccctcttcatgtcactgatgcttcctcagcatccacaggtcaggccacccctcttcctgtcaccagcctttcctcagtatccacaggtgacaccacgcctcttcctgtcactagcccttcctcagcatccacaggtcacgccacccctcttcttgtcaccgacacttcctcagcatccacaggacacgccacccctcttcctgtcaccgacgcttcctcagtgtccacagatcacgccacctctcttcctgtaaccatcccttccgcagcatccacaggtcacaccacccctcttcctgtcaccgacacttcctcagcatccacaggtcaggccacctctcttcttgtcaccgacacttcctcagtatccacaggtgacaccacgcctcttcctgtcactagcacttcctcagcatccacaggtcacgtcactcctcttcatgtcaccagcccttcctcagcatccacaggtcacgccacccctcttcctgtcaccagcctttcctcagcatccacaggtgacaccatgcctcttcctgtcactagcccttcctcagcatccacaggtgacaccacccctcttcctgtcaccgacgcttcctcagtatccacaggtcacaccacccctcttcctgtcaccagcccttcctcagcatctacaggtcacaccacccctcttcctgtcaccgacacttcctcagcatccaaaggtgacaccacccctcttcctgtcaccagcccttcctcagcatctacaggtcacaccacccctcttcctgtcaccgacacttcctcagcatccacaggtgacaccacccctcttcctgtcaccaatgcttcctcattatccacaggtcacgccacccctcttcatgtcaccagcccttcctcagcatccacaggtcacgccacccctcttcctgtcaccagcacttcctcagcatccaccggtcacgccacccctcttcctgtcaccggcctttcctcagctaccacagatgacaccacccgtcttcctgtcaccgacgtttcctcggcatccacaggtcaggccacccctcttcctgtcaccagcctttcctcagtatccacaggtgacaccacgcctcttcctgtcactagcccttcctcagcatccacaggtcacgccagccctcttcttgtcactgacgcttcctcagcatccacaggtcaggccacccctcttcctgtcaccgacacttcctcagtatccacagctcacgccaccccacttcctgtcaccggcctttcttcagcttccacagatgacaccacccgtcttcctgtcaccgacgtttcctcggcatccacaggtcaggccatccctcttcctgtcaccagcccttcctcagcatccacaggtgacaccacccctcttcctgtcaccgacgcttcctcagcatccacaggtgacaccacctctcttcctgtcaccatcccttcctcagcatcttcaggtcacaccacctctcttcctgtcaccgacgcttcctcagtgtccacaggtcacgccacctctcttcttgtcaccgacgcttcctcagtatccacaggtgacaccacccctcttcctgtcaccgacactaactcagcatccacaggtgacaccacccctcttcatgtcaccgacgcttcctcagtatccacaggtcacgccacctctcttcctgtcaccagcctttcctcagcatccacaggtgacaccacgcctcttcctgtcactagcccttcctcagcatcctcaggtcacaccacccctcttcctgtcaccgacgcttcctcagtacccacaggtcacgccacctctcttcctgtcaccgacgcttcctcagtgtccacaggtcacgccacccctcttcctgtcaccgacgcttcctcagtgtccacaggtcatgccacccctcttccggtcaccgacacttcctcagtatctacaggacaggccacccctcttcctgtcaccagcctttcctcagcatccactggtgacaccacgccgcttcctgtcaccgatacttcctcagcatccacaggtcaggacacccctcttcctgtcaccagcctttcctcagtatccacaggtgacaccacgcctcttcctgtcactaacccttcctcagcatccacaggtcacgccacccctcttcttgtcaccgacgcttcctcaatatccacaggtcacgccacctctcttcttgtcaccgacgcttcctcagtatccacaggtcacgccaccgctcttcatgacaccgatgcttcctcattatccacaggggacaccacccctcttcctgtcaccagcccttcctcaacatccacaggtgacaccacccctcttcctgtcaccgaaacttcctcagtatccacaggtcacgccacctctcttcctgtcaccgacacttcctcagcatccacaggtcacgccacctctcttcctgtcaccgacacttcctcagcatccacaggtcacgccacccctcttcctgtcaccgacacttcctcagcatccacaggtcaggccacccctcttcctgtcaccagcccttcctcagcatccacaggtcacgccatccctcttcttgtcaccgacacttcctcagcatccacaggacaggccacccctcttcctgtcaccagcctttcctcagcatccacaggtgacaccacccctcttcctgtcaccgacgcttcctcagtgtccacaggtcacgccacctctcttcctgtcaccagcctttcctcagtatccacaggtgacaccactcctcttcctgtcactagcccttcctcagcatccacaggtcacgccacccctcttcatgtcaccgacgcttcctcagcatccacaggtcacgccacccctcttcctgtcaccagcctttcctcagcatccacaggtgacaccacgcctcttcctgtcactagcccttcctcagcatccacaggtcacgccacccctcttcatgtcaccgacgcttcctcagtatccacaggtgacaccacccctcttcctgtcaccagctcttcctcagcatcctcaggtcacaccacccctcttcctgtcaccgacgcttcctcagcatccacaggtgacaccacccctcttcctgtcaccgacacttcctcagcatccacaggtcacgccacccatcttcctgtcaccggcctttcctcagcttccacaggtgacaccacccgtcttcctgtcaccaacgtttcctcggcatccacaggtcatgccacccctcttcctgtcaccagcacttcctcagcatccacaggtgacaccacccctcttcctggcaccgacacttcctcagtatccacaggtcacaccacccctcttcttgtcaccgacgcttcgtcagtatccacaggtgacaccacccgtcttcctgtcaccagcccttcctcagcatctacaggtcacaccacccctctacctgtcaccgacactccctcagcatccacaggtgacaccacccctcttcctgtcaccaatgcttcctcattatccacacgtcacgccacctctcttcatgtcaccagcccttcctcagcatccacaggtcacgccacctctcttcctgtcaccgacacttccgcagcatccacaggtcacgccacccctcttcctgtcaccagcacttcctcagcatccacaggtgacaccacccctcttcctgtcaccgacacttactcagcatccacaggtcaggccacccctcttcctgtcaccagcctttcctcagtatccacaggtgacaccacgcctcttcctgtcactagcccttcctcagcatccacaggtcacgccactcctcttcttgtcaccgacgcttcctcagcatccacaggtcaggccacccctcttcctgtcaccagcctttcctcagtatccacaggtgacaccacgcctcttcctgtcactagcccttcctcagcatccaccggtcatgccacctctcttcctgtcaccgacacttcctcagcatccacaggtgacaccacctctcttcctgtcaccgacacttcctcagcatacacaggtgacaccacctctcttcctgtcaccgacacttcctcatcatccacaggtgacaccacccctcttcttgtcaccgagacttcctcagtatccacaggtgacaccacccctcttcctgtcaccgacacttcctcagcatccacaggtcacgccacccctcttcctgtcaccaacacttcctcagtatccacaggtcacgccacccctcttcatgtcaccagcccttcctcagcatccacaggtcacaccacccctcttcctgtcaccgacgcttcgtcagtgtccacaggtcacgccacctctcttcctgtcaccgacgcttcctcagtgttcacaggtcatgccacctctcttcctgtcaccatcccttcctcagcatcctcaggtcacaccacccctcttcctgtcaccgacgcttcctcagtgtccacaggtcacgccacctctcttcctgtcaccgacgcttcctcagtgtccacaggtcatgccacccctcttcctgtcaccgacgcttcctcagtgtccacaggtcacgctacccctcttcctctcaccagcctttcctcagtatccacaggtgacaccacgcctcttcctgtcaccgacacttcctcagcatccacaggtcaggccacccctcttcctgtcaccagcctttcctcagtatccacaggtgacaccacccctcttcctgtcaccgacacttcctcagcatccacaggtcacgccacctctcttcctgtcaccgacacttcctcagcatccacaggtcacgccacccctcttcctgacaccgacacttcctcagcatccacaggtcacgccacccttcttcctgtcaccgacacttcctcagcatccataggtcacgccacctctcttcctgtcaccgacacttcctcaatatccacaggtcacgccacccctcttcatgtcaccagcccttcctcagcatccaccggtcacgccaccccgcttcctgtcaccgacacttcctcagcatccacaggtcacgccaaccctcttcatgtcaccagcccttcctcagcatccaccggtcacgccaccccgcttcctgtcaccgacacttcctcagcatccacaggtcacgccacccctcttcctgtcaccagcctttcctcagtatccacaggtgacaccacgcctcttcctgtcactagcccttcctcagcatccacaggtcacaccacccctcttcctgtcaccgacacttcctcagcatccacaggtcaggccaccgctcttcctgtcaccagcacttcctcagcatccacaggtgacaccacccctcttcctgtcaccgacacttcctcagcatccacaggtcaggccacccctcttcctgtcaccagcctttcctcagtatccacaggtgacaccacgcctcttcctgtcactagcccttcctcagcatccacaggtcacgccactcctcttcttgtcaccgacgcttcctcagcatccacaggtcaggccacccctcttcctgtcaccagcctttcctcagtatccacaggtgacaccacgcctcttcctgtcactagcccttcctcagcatccaccggtcatgccacctctcttcctgtcaccgacacttcctcagcatccacaggtgacaccacctctcttcctgtcaccgacacttcctcagcatacacaggtgacaccacctctcttcctgtcaccgacacttcctcatcatccacaggtgacaccacccctcttcttgtcaccgagacttcctcagtatccacaggtcacgccactcctcttcttgtcaccgacgcttcctcagcatccacaggtcacgccacccctcttcatgtcaccagcccttcctcagcatccacaggtgacaccacccctgtgcctgtcaccgacacttcctcagtatccacaggtcacgccacccctcttcctgtcaccggcctttcctcagcttccacaggtgacaccacccgtcttcctgtcaccgacatttcctcggcatccacaggtcaggccacccctcttcctgtcaccaacacttcctcagtatccacaggtgacaccatgcctcttcctgtcactagcccttcctcagcatccacaggtcacgccacccctcttcctgtcaccagcacttcctcagcatccaccggtcacgccacccctgttcctgtcaccagcacttcctcagcatctacaggtcacaccacccctcttcctgtcaccgacacttcctcagcatccacaggtgacaccacccctcttcctgtcaccagcccttcctcagcatctacaggtcacaccacccctcttcatgtcaccatcccttcctcagcatccacaggtgacaccagcactcttcctgtcaccggcgcttcctcagcatccaccggtcacgccacccctcttcctgtcaccgacacttcctcagtatccaccggtcacgccacgcctcttcctgtcaccagcctttcctcagtatccacaggtgacaccacccctcttcctgtcaccgacgcttcctcggcatccacaggtcaggccacccctcttcctgtcaccagcctttcctcagtatccacaggtgacaccacccctcttcttgtcaccgacgcttcctcagtatccacaggtcacgccacccctcttcctgtcaccgacacttcctcagcatccacaggtgacaccacccgtcttcctgtcacggacacttcctcagcatccacaggtcaggccacccctcttcctgtcaccagcctttcctcagtatccacaggtgacaccacccctcttcttgtcaccgacgcttcctcagtatccacaggtcacgccacccctcttcctgtcaccgacacttcctcagcatccacaggtgacaccacccgtcttcctgtcacggacacttcctcagcatccacaggtcaggccacccctcttcctgtcaccatcccttcctcatcatcctcaggtcacaccacccctcttcctgtcaccagcacttcctcagtatctacaggtcacgtcacccctcttcatgtcaccagcccttcctcagcatccacaggtcacgtcacccctcttcctgtcaccagcacttcctcagcatccacaggtcacgccacccctcttcttgtcaccgacgcttcctcagtgtccacaggtcacgccacgcctcttcctgtcaccgacgcttcctcagcatccacaggtgacaccacccctcttcctgtcaccgacacttcctcagcatccacaggtcaggccacccctcttcctgtcaccagcctttcctcagtatccacaggtgacaccacccctcttcctgtcaccgacgcttcctcagcatccacaggtcacgccacccctcttcctgtcaccatcccttcctcagtatccacaggtgacaccatgcctcttcctgtcactagcccttcctcagcatccacaggtcacgccacccctcttcctgttaccggcctttcctcagcttccacaggtgacaccacccctcttcctgtcaccgacacttcctcagcatccacacgtcacgccacccctcttcctgtcaccgacacttcctcagcttccacagatgacaccacccgtcttcctgtcaccgacgtttcctcggcatccacaggacatgccacccctcttcctgtcaccagcacttcctcagcatccacaggtgacaccacccctcttcctgtcaccgacacttcctcagtatccacaggtcacgccacctctcttcctgtcaccagccgttcctcagcatccacaggtcacgccaccccccttcctgtcaccgacacttcctcagtatccacaggtcacgccacccctcttcctgtcaccagcacttcctcagtatctacaggtcacgccacccctcttcctgtcaccagcccttcctcagcatccacaggtcacgccacccctgttcctgtcaccagcacttcctcagcatccacaggtgacaccacccctcttcctgtcaccaatgcttcctcattatccacaggtcacgccacccctcttcatgtcaccagcccttcctcagcatccagaggtgacaccagcactcttcctgtcaccgatgcttcctcagcatccaccggtcacgccacccctcttcctctcaccagcctttcctcagtatccacaggtgacaccacgcctcttcctgtcaccgacacttcctctgcatccacaggtcaggccacccctcttcctgtcaccagcctttcctcagtatccacaggtgacaccacgcctcttcctgtcaccatcccttcctcagcatcctcaggtcacaccacctctcttcctgtcaccgacgcttcctcagtgtccacaggtcacggcacccctcttcctgtcaccagcacttcctcagcatccacaggtgacaccacccctcttcctgtcaccgacacttcctcagcatccacaggtcacgccacccctcttcctgtcaccgacacttcctcagcatccacaggtcacgccacccctcttcctgtcaccagcctttcctcagtatccacaggtcacgccacccctcttgctgtcagcagtgctacctcagcttccacagtatcctcggactcccctctgaagatggaaacaccaggtagctgccaactgcctcgcctttatgtctcccagtgggccccttggcggaattcagcctaaggagtacctgagaacactggtgcattcgcattacctggtggggccgtgtcaggtcccacaggggaggaggtgatgggtgtggtgggtgacaggctcaccctcctttgtgccgcaatcgaaaagcactgatgtcgagagtagtttggatatgagcaggggagagacaaggagtttccagctccctcttccagctcctgatttctttgaatctctttgactctcctgttttgttactgtaagaaacaccccgccttgtcttttcacgtgtccaggaatgacaacaccgtcactgaagacagacggtgggagacgcacagccacatcaccaccccccacaacctcccagaccatcatttccaccattcccagcactgccatgcacacccgctccacagctgcccccatccccatcctgcctgagagaggtgaggccatacaggtgaggcctgtgccttttgaggggtgatgtaactgaaggctccctctcagcctacttcccacagtctccgctctctcgggtggggagggccttaccgaggacagggacacagcatcggagtcgctcctgagggctggctttgtgcatggcactgggccaggagctggagacagagaaatgaccccagtgccattcagcaagggatagatggacggtccggtagcggcggttagaggactcatcccagggtctaagtgcacacaatggaaggccctaaggaatgcagagccggggatggaggagcaccccaggcagggaggagggcgggaacagctggaacaaaggtgtggaaggtatgggtgtggaaggtatgggtgtggaaggtatggctgtggaaggtatgggtgtggaaggtatgggtgtggaaggtatgggtgtggaaggtatggatgtggaaggtatgggtgtggaaggtatgggtgtggaaggtatgggtgtggaaggtatgggtgtggaaggtatgggtgtggaaggtaagggtgtggaaggtatgggtgtggaaggtatgggtgtggaaggtatgggtgtggaaggtatggatgtggaaggtatgggtgtggaaggtatgggtgtggaaggtatgactgtggaaggtatgggtgtggaaggtatgggtgtggaaggtatgggtgtggaaggtatgggtgtggaaggtatgggtgtggaaggtatgggtgtggaaggtatgactgtggaaggtatgggtgtggaaggtatgactgtggaaggtatgggtgtggaaggtaagggtgtggaaggtatgggtgtggaaggtatgggtgtggaaggtatgggtgtggaaggtatgggtgtggaaggtaagggtgtggaaggtatgggtgtggaaggtatgggtgtggaaggtatgggtgtggaaggtaagggtgtggaaggtatgggtgtggaaggtatgggtgtggaaggtatgggtgtggaaggtatggatgtggaaggtatgggtgtggaaggtatgggtgtggaaggtatgactgtggaaggtatgggtgtggaaggtatgactgtggaaggtatgggtgtggaaggtatgggtgtggaaggtatgggtgtggaaggtatggatgtggaaggtatgggtgtggaaggtatgggtgtggaaggtatgactgtggaaggtatgggtgtggaaggtatgactgtggaaggtatgggtgtggaaggtatgggtgtggaaggtatgggtgtggaaggtatgggtgtggaaggtatggatgtggaaggtatgggtgtggaaggtatgggtgtggaaggtatgactgtggaaggtatgggtgtggaaggtatgactgtggaaggtatgggtgtggaaggtaagggtgtggaaggtatgggtgtggaaggtatgggtgtggaaggtatgggtgtggaaggtatgactgtggaaggtatggccgtggaaggtatgggtgtggaaggtatgggtgtggaaggtatgggtgtggaaggtatgggtgtggaaggtatgggtgtggaaggtatgggtgtggaaggtatgactgtggaaggtatgggtgtggaaggtaagggtgtggaaggtatgggtgtggaaggtatgggtgtggaaggtatgactgtggaaggtatgggtgtggaaggtatgggtgtggaaggtatgggtgtggaaggtatgggtgtggaaggtatgggtgcggaaggtatgggtgtggaaggtatgggtgcggaaggtatgggtgtggaaggtatgggtgtggaaggtatggatgcggaaggtatgggtgtggaaggtatgggtgcggaaggtatgggtgcggaaggtatgggtgtggaaggtatgggtgtggaaggtatgggtgtggaaggtatgggtgtggaaggtatggctgtggaaggtatgggtgtggaaggtatgggtgtggaaggtatgactgtggaaggtatgggtgtggaaggtatgggtgtggaaggtatgggtgtggaaggtatgggtgtggaaggtatgggtgtggaaggtatgggtgtggaaggtatggatgtggaaggtatgggtgtggaaggtatgggtgtggaaggtatgactgtggaaggtatgggtgtggaaggtatggctgtggaaggtatgggtgtggaaggtaagggtgtggaaggtatgggtgtggaaggtatgggtgtggaaggtaagggtgtggaaggtatgggtgtggaagttatggccgtggaaggtatggatgtggaaggtatgggtgtggaaggtatgactgtggaaggtatggatgtggaaggtatgggtgtggaaggtatgggtgtggaaggtatgactgtggaaggtatgggtgtggaaggtatgggtgtggaaggtatgggtgtggaaggtatgggtgtggaaggtatggccgtggaaggtatgggtgtggaaggtatgaccgtggaaggtatggccgtggaaggtatgggtgtggaaggtaagggtgtggaaggtatgggtgtggaaggtatgggtgtggaaggtaagggtgtggaaggtatggatgtggaaggtatgggtgtggaaggtatgggtgtggaaggtatcggtgtggaaggtatgggtgtggaaggtatgactgtggaaggtatgggtgtggaaggtatgactgtggaaggtatgggtgtggaaggtatgggtgtggaaggtatgggtgtggaaggtatgggtgtggaaggtatgactgtggaaggtatgggtgtggaaggtatgggtgtggaaggtatggctgtggaaggtatgggtgtggaaggtatgactgtggaaggtatgggtgtggaaggtatgggtgtggaaggtatgggtgtggaaggtatgggtgtggaaggtatgggtgtggaaggtacgagtgtggtaggtatggctgcagaaagtcgtcccggtgctgcatgggggtggatccccgaagcatttggggtggctgaaaatgagaagaagggtagcaaaaagtgcggccggcatgcggggaatcctgtaggcaacgggagccagggaggactcagttttgcattgtacaaatggcatttaacaagtggtgcctggagcggtccgatttgcaggcagtgaggaggccaggagagcctgcgggtttccaagcaggaccaggggagggcgccaaggagtcggcagctgcgagaaatatttgggacaaggtttctcaaactggagcccgagggcctctagggagtcctaggttaaattggaggagtcttcaagtttatctggagaaaggccgtcttaggaaacaagtctcattccctgaaaagggctttgcagttactcatcttcattgcgctggacttttgtctatttttttttttttttttgagatggagttttcgctcttgttgcccaggctggagtgcagtggcgcgatctcagctcactggaacctcagcctcccgggttcaagcaattctcctgcctcagcctcccgagtggctgggattacaggcatgcgccaccacacccggctaatttttgtattttaagtagagacagggcttctccatgttggtcaggctggtctcgaactcctgacctcgtgatcctcccgcctcagcctcccaaagtgctgggattacaggcgtgagccaccgcacccagcatagacttttgtcttttaaccctgaaaaggattgagactaagagattgagaatcgtttgctggtattctgacagcaggacctgtttttctccaagctggggaaggatgagaggcgcagtttagggagtaaaatgaccacatgcatttaatgtgggtggagagggagcgagaagcaccctagatggctgcctctggggccctcggggaacacaggacaggtgtgggcagcctgcagggagcgctctgggatccctttcagccctaaagaaggcccaggcccacttggacttcctgctcttctctgtcctggcccaggagtttccctcttcccctatggggcaggcgccggggacctggagttcgtcaggaggaccgtggacttcacctccccactcttcaagccggcgactggcttcccccttggctcctctctccgtgattccctctacgtgagtccgggctgcggcccgcgcagcctgaactcccagggcccacttctctctcctgcttcgagacggaacccagaggaagcgggaatggaagcagccttggctgggcccctcgtccatccccacagcctccttaatgtcaggcctctgcctgaggaacacagggtgccaggcgagggctgcccacctgctgggcccaccgctgcttctgcggggccttctcaggagtaaaaagctacacttgggaaactggactgttcctgccgtttccaccttctgggatttgtctctggccccctggtccctgcctcctggagcagagttggagggacagtcctggctcctgtggccctgagggaggaggctgagtccgaacacagcatgagagggcgactgagcgatggagagggtgtccacacctgctgagcgatagagagagggtgtccacacctgctgagcgatggcgagagggtgtccacacctgctgagcgatggcgagagggtgtccacacctgctgagcgatggcgagagggtgtccacacctgctgagcgatagagagagggtgtccacacctgctgagcgatggcgagagggtgtccacacctgctgagcgatagagagagggtgtccacacctgctgagcgatggagagagggtgtccacacctgctgagtgatagagagagggtgtccacacctgctgagcgatggagagagggtgtccacacctgctgagtgagagagaggtttccaccccctaagtgatggagatggggtgtctgcacccctgagtgatggagagagggtgtctacacccctgagcgatggaggggggtgcctacacctgctgagcgatagagagaggtttccaccccctaagtgatggagatggggtgtctgcacccctgagcgatggagagagggtatctacacctgctgagtgatagagagaggtttccaccccctaagtgatggagatggggtgtctgcacccctgagcgatggagagagggtgtctacacccctgagcgatggagagggggtgtctacacccctgagcgatggagagaggatgtctacaccccgaacgatagagagggtgtccacacccctgagcgatgaagggagggtgtctacacccctgagcgatggagagagggtgtccacacccctgagcgatggagagagggtgtctacacccctgagcgatggagagagggtatctacacccctgagcgatggagagagggtgtctacacccctgagcgatgaagggagggtgtctatagccctgagcacccctgagcgatgaagggagggtgtctatacccctgagcgatggagagagggtgtctacacccctgagcgatggagagggggtgtctacacccctgagcgatggagagggggtgtctacacccctgagcgatggagagaggatgtctacacccctgagcgatgaagggagggtgtctacacccctgagggatggagagagggtgtccacacctgctgagtgatagagagaggtttccaccccctaagtgatggagatggggtgtctgcacccctgagcgatggagagagggtgtctacacccctgagcggtggagagagggtgtctacacccctgagcgatgaagggagggtgtctacacccctgagcgatgaagggagggtgtctacacccctgagcgatggagagagggtgtctacacccctgagcgatggagggagggtgtctacacccctgagcgatgaagggagggtgtctacacccctgagcgatgaagggagggtgtctacacccctgagcgatggagagagggtgtctacacctgctgagcaatagatagagggttccaccccctaagtgatggagatggggtgtctgcacccctgagcgatggagagagggtgtctacacccctgagcgacggagggagggctccacccactgagcgatggagggagggctccaccccctgagcgatggagagagggttccactccctgagccccacctaatgtgtcgcaaacttcaggatggggcccaggggactggccaagaggggtgtgcctgtgaggggctggtccacagccagggatctgcagtgaaacaggaccaagcctaccacccgaggacgcaagggatggcctgagggcggagcattctgtgagaatatatggaaagggctctccccaaaacaggacacaggaggtgacttccaggggttgttagcatctctaaagctctacccttgggggtcacgcttttgaggagctggaccaaggctgggactttcctccccacttccctccctgaatgctgaccacaaaacccatgtgctcagttcacagacaatggccagatcatcttcccagagtcagactaccagattttctcctaccccaacccactcccaacaggcttcacaggccgggaccctgtggccctggtggctccgttctgggacgatgctgacttctccactggtcgggggaccacattttatcaggtgagcctttcaaagcctggcagtcaggatcccccagcagctggcaggggagacaaagagctgtgtggaaggctttgccagagttgctgctgtgacagcccctgcagcaggggactgaggcttaaatatgggtgtgggaggaagcagtcaagggacattaagctgactcaggagtaccccaacccaaccacgagactgaccaggaataccccaacccaaccacgagactgaccaggaataccccaacccggccgcgagactgaccaggaataccccaacccaaccacgagactgaccaggaataccccaacccaaccacgagactgaccaggaataccccaacccaaccacgagactgaccaggaataccccaacccaaccacgagactgaccaggaataccccaacccaaccacgagactgaccaggaatacaccaacccaaccacgagactgaccaggaataccccaacccaaccacgagactgaccaggaataccccaacccggccgcgagactgaccaggaataccccaacccggccacgagactgaccaggaataccccaacccggccacgagactgaccaggaataccccaacccaaccacgagactgaccaggaataccccaacccaaccacgagactgaccaggaataccccaacccggccgcgagactgaccaggaataccccaacccggccacgagaagacctacaggtgacgggggatgggggctgacaattcagcctttgattgtaaaatcaggctgtagggggtctatcctaacaagagtgagtcaagagggcccgtcctgtgctcctggactgggtgaataactccaatcagaggaaatgtgatgaaagctactgcaggaagtgtggaccgtgcccctgccacggacagggcagtgtggaggctccaagaggaagagactcacgcctgttctcaagaagctgcagattaggcatggggaggtaaaagtgggcccgagtggctctgctctctgggccagtttgagctaagatgcttgagttcaagtccagaggtcttggacgtctgggccacgaccctgcattctgcacactgcaggccttcctgcagcccaagtttgaattgaacttcacctcagaaaagctcacggcaaaaatgcaggcctgggacaggggagggcaggccattgggtgggctgaagtgggcagggtcctcaggcagaaagtggggggcccatgtgtaggagtgggaccctcgttggcttgttttcatctgccctcctttcctaggaatacgagacgttctatggtgaacacagcctgctagtccagcaggccgagtcttggattagaaagatgacaaacaacgggggctacaaggccaggtgggccctaaaggtcacgtgggtcaatgcccacgcctatcctgcccagtggaccctcggggtgagtagacccctgggcagctcccaggagctatctgggagtcagacatcctagaatcctaggcaggggccactcttccaaaatcctctctggctctaggaaagattgctaattatagcaagcccccccaccgccacccccccactgccaccactgttggctgagcactcaccgtgggcccggcctgtctcggccctttgcctacttgacctcacagcagcccagcaaaccgggtattattaggctgaaacatagcaagtggcatttttgtaagtcaaaaatgtctggctattcacaatttcacgtggctcagtctggtattatgctccccattttacagatgaggaagacaatggttagagaggttaagtaactcgttcagagtcacgccactggcaaatggcaaagccaggcctgagtggagcttcttctgactccagcctctggctctgaagcacaggctcatccaacgggcacagggtgcgccacaccatctcctctgtcctccctccgaggaccccgctcttgtagtcaccaagttcttccttatgcctggtctaaagtcactcatttcttcattcactcgacaaaagttcactggtcacctactgtggacaacgtgtgcgccttcagtgaaccccagtgtcatccatgctgtttagatggaggagacaatttgggcaatgtccttaaatatccgcgcgggagctaatgaagcctcctctctagctctctggtatcttggctgatctcaggttctggtagctttctctaacaaacactcatctaactgaattgtaacccagaaccctttatctcccctcctggaagaaagtcaccaaaaggcaaatccaccgtggtaagtgcgttcgcacccagggtgaaagctgccctcactgacccaaaacttgccagcattttgggcccatgtctttgctgtgggcagaccaggaacaggtgctgtgcgtgtcagagcagggctgtgggacgggcggggggacataagagaggagaccccggatctctcacgggcatccctgtgttttcttccacccacccccagagcaacacctaccaagccatcctctccacggacgggagcaggtcctatgccctgtttctctaccagagcggtgggatgcagtgggacgtggcccagcgctcaggcaacccggtgctcatgggcttctctaggtaggatgggaggggctgtcagcactgagcagttggcagggaggggtgtagagtcggctttcgctgcacacacactcccatcctggggcaaggcgggaaccctcctggctggtgcttctgactcacgctgactccagctcccgctggggccaggcatctggctgcttcccacgacaagatcacccatttgtccgccatgccctttcccatcccagtccccgtgagttgtaatcattcccagagctttggcttccctgatttccactgacattagctggcctctcttaccttctcaaatatcgtgataataacagccaagactgatgacactaacacttcgtgtacattactgcatgtcatgatcacagccaccccacgaggcagatactatttatcatccccattctacagatcaggaaactgagatacaaatagactagcaatttgcctaaagtcccagagctgggaagtggcaacatggagatttgaacccagacatctgaggctagaatctgccttcctgacttcctgagaattacccacttatccagggggcacccaaaagcttatatggagccggtggtgaagggagagaggaggcacggggctgtgggcggttgaaatgtggattcccgtgtgtgggaggctgtctccgatgtagcagtgcgccatctctgttcccatatgctggggtgtggcaatcagtacgaaggccacatgtcttttgttcttgataattgctgcaaatgtcttctcttacattgagtgtgttcaggttacccctttgattacactgctttcactagtttcttggtgtgctatgaaggagaaaggaggggaattacccaactctaggaatttcacacggtccaggtacacccaaggaaggtgtcacgcaggggtgcatcatcctgcttgtgtcagggaggaggaaaagcccaagagtccccactctgcagcaggcacccagggtggggctgcaggcggctgctccaggctttcctccttcccgggccatgctcggaccccacacctggggacggtgatggcgatagtggtggtggtggtggtggtggtggtggtagtggcggtggaggtggcagtggcgatggtgatggtggtgatggtggtggtgatggtggtgatggtggtggtgttgggggtgatggtggcgatggtggtggtggtgatggtggtggtggtggtgatggtggtgatgatggtggtggcaatgatggtggtgatggtggtggtggtggtgatggtggtggtggcgatggtgatggtggtggtgatggtggtggtggccgatggtggtattttttggggggtggccagtgatggtggtgatggtgatggtggtggtggtggtggtggcgatggtggtggtgatggtggtgatggtggtggcaatggtgatgatggtggtggtggtgatggtggtggtgatggtggtggcaatggtaatggtgatggtgatgatggtggtggcgatggtggtggtgatggtgatggtggtggtgatggtgatggtggtggtgatggtgatggtggtggtagtgttggtggtggtggtggtgatggtgatggtgatggtagtgttggtggtgacgatgatggtggtggtggtggtagtgctggcgatggtggtggtggtggtagcagcagtggcagcatctgttgtatcaaggcctcactcagttctgagggatttgcagatgttactgcatttaatcctcacaatacagtgaggtagatgccactgtaatcccttttatacagatgtgaaaactaagaatcagagagggtcagtaacttgtctgtggtcaccaagctagtaagtggggggatcagcagttgaatccatcactgcctaactccagaaactgggtcttaaccatcacaatacactgtccctagagtctgtcccgctccaaaccctctgcttgttgaagggaaacaaacagaaatgaggcctgaactctgttgttttcacgcccctgtctcatgaccaagcggacctgccagtttcttgcagctagcgatcagatgtggaatcggttagagcctcctacctctgcccagccatcttgtcccctctcctgctcagtgctggggcttgacgatgggggctggctgacccactgacccactgcccgcctagctggttgaccagctgctgaccggctagcgggatgaatggacgccttgcaaccgcgaggcaagagcctgtgcacggcagaggcctgagagtctctcctttcctgcagtggagatggctatttcgaaaacagcccactgatgtcccagccagtgtgggagaggtatcgccctgatagattcctgaattccaactcaggtaaaagtgccaccttatcacacctgagctggtctcaagccctcgcgtgtcctccagcccatacaccatcgcagtcctagagggcacctccctaacatcacggccatcctgaagggcctcccccacacagttcaacctcctacaggtctaggtgggatgtggcaccacccagggagcagctggcacctcctgcacccctggacacagcacagtctcagagggggctacatctcctccctcagatgaaccagcccaagagggctctcggggggcccagatcctggaagtgaggacagggtcttgtgggaggtgggatttgaatgggcagttcagacaatactccaagtgtcctgtccagagcaggaatgagaacccaggtgagatcctttaagaaaatctaccggctgggcgccatggctcacacctgtaatcccagcattttgggaggctgaggtgggcggatcacttgagatcaggagttcgagaccagcctggccaacatggtgaaattctgtctctactaaaaatacaaaaattagccagacgttgtggtgcacacctgtaattccagctactcaataggttgaggcaggagaattgtttgaacctgggaggtggaggttgcagcgagccgagatcgcgccactgcactccagcctgggtgacagagtgagactccatctcaaaaagagagaatccaccaagaagaggcccgggggtctcacgttcattgtcatcatttactgggcacctgccgtgtgctggacaccgtgctaacagccagaaacaaaggaaaaagaccaactgtgttttctctcaaagagctttcatgcgggtagaaagacaagcgtcaagaggcaaacaatggcgccttctccatgactcagtccagaggccccaatgggaaagaaataatagtttccaaaatgtgataggttgaaggacattttagccttagaaaccagccacgtgaactgtgaagtgtaaatccagttctatttgttctgtggcaaccacgtttggtcgtcagaagcagacgctaagtcaagcgaggggctttgggggaggaattgttgcccatctgacttgggtccaaagaggtgagaagtggcaggagggggtgcatttgtgagttttggttgaccctaaagctgagacagggcctgcagccccagccctggataagccctttcccccccatccccgacctcaggcctccaagggctgcagttctacaggctacaccgggaagaaaggcccaactaccgtctcgagtgcctgcagtggctgaagagccagcctcggtggcccagctggggctggaaccaggtctcctgcccttgttcctggcagcagggacgacgggacttacgattccaacccgtcagcataggtgacacctccttcccgccccccacaagcccacccaccaccctctctgctcacgccctcagcctctccccagaaacagcccctgcttgttcccaccccgcccctggcagccccagcctgggcctgagtgggactggacttgtttcaggtcgctggggcctcggcagtaggcagctgtgcagcttcacctcttggcgaggaggcgtgtgctgcagctacgggccctggggagagtttcgtgaaggctggcacgtgcagcgtccttggcagttgggtgcgtgagtccgtgatctcaaccccaccttcccggccaagtaggggaccctcagcatgaagcctctcgtcctcattccttcccagacccttcccctctctgggcctccacttcctgatcgggtaacgttaggaagcttccaacatccccaccagcggacattcggggatgtatgagctgagagcctctttcctcatctctatacctggctccacatccccaggccagagtggggccatttctccaggcaagaagagagcgcctaggctgaccccgtccctgtagacccagatgagcaggatgtttgggggaagactgagagtcagctcccacagagacgctccaagggagctggagagcgcaggggtgtggggtcacgtggtctgtgtcctcccgttctctcccccgtcccatggcagtttccacagttcccagaccgtcagccgtgccctccccactcccagcacgttgagagcagcagtacttggctctccaccctcaagacaggaaatttgcttagctcctaccatgcgccctgctgcacagtggccccaatgcctgcaaaagagacagcaccctattcactgcccaaggtcatgagaagggccatgctggattccaaagccatgctcttgccaccaacaccgccctgccctaccaagctctccaccaacaccgccctgccctgccaagctctccaccaacaccgccctgccctgccaagctctccaccaacaccgccctgccctgccaagctctcaaccaacaccaccctgccctgccaagcttctccaggtcctcaacctccccgactcactgctgttctccgcagcccaggaactggagccacagagctggtgctgccgctggaatgacaagccctacctctgtgccctgtaccagcagaggcggccccacgtgggctgtgctacatacaggcccccacagcccggtgagcgacagggcccaggcccaggaagagcctctggggagggggagcttctgggcttccgggaggtggcatctggataaggagtaggggcagagctgtggccacaagggaagatggagatgacgccagtgatgggtggatggtcagtggaggggctttgtacctgagttggggaaggagtgagaatagcggggcacgaaaatgcaaggaggcttgaggggaggattctgtgctctgtgaacatctccccagctgagtccgcccggacaagtgccccagtcgactgcagtgaggaacctcaccctgagtcctcctggacaagtgccgcacctgactgcagtgaggaacctcagccctacacatgatttgtcatgctgaggcagcatctcttttttccttccagcctggatgttcggggacccccacatcaccaccttggatggtgtcagttacaccttcaatgggctgggggacttcctgctggtcggggcccaagacgggaactcctccttcctgcttcagggccgcaccgcccagactggctcagcccaggccaccaacttcatcgcctttgcggctcagtaccgctccagcagcctgggccccgtcacggtgagtgaggggtgccgggaacctccctgcattccacccacagggaccttcagccacatactgaggccgaggagaaggaagagagcgaaggaggggaagccgggcaggagggagggaggacacagcccatccacgcagctgtcccggagtaaatcctggggatggtggattagggctctggccccacggtttcccagctgcttggcttcgaagaaactacttaatttggttttctcctagtaagaatggggatgacattacctgcctcacgggctgttgtaagagctaaagggcataatccgaaaaccatgcctggccctgccgagcacacggtagacggcggctggcatcacctcaggccgcggcctccagcgccttcctcccggcccagggcgcagcttccagccccaggggctctcccagctgctttcctgggcgtcggctccacctgcgggtcgggctcaggccccctcccatctccttccaggtccaatggctccttgagcctcacgacgcaatccgtgtcctgctggataaccagactgtgacatttcagcctgaccatgaagacggcggaggtaggttggggagcgccggccgccccctccccgcaccgggagcagcgaggtgggcgggaagccgcgttgcggtgcagggccgggcgcgtggcggtgcagggccgggtgcgttgtggtgcagggccgggcgcgtggcggtgccgcgccgagtgctttgcggtgcagggccgggtgcgttgtggtgcagggcccggtgcgtggcggtgcagggcccggtgcgtggcggtgcagggccgggtgcgtggcggtgcagggccgggtgcgtggcggtgcagggcccggtgcgttgcggtgcagggccgggtgcgttgcggtgcagggcccggtgcgtggcggtgcagggccgagtgcgttgtggtgccgggcccggtgcgtggcggtgcagggcccggtgcgtggcggtgcagggccaagagagcgcagcctctacccccgagcggggcgtgcagctcgccggcctcttctccgcctccagtgcagacccctcccggcttcagccccaggggcggggtgggggtggtgcgggcccggcagggcgcgggtttggtgcgggccgtggtgccgacctggcttcctctccgctgcctcccgatgctccaggccaggagacgttcaacgccaccggagtcctcctgagccgcaacggctctgaggtctcggccagcttcgacggctgggccaccgtctcggtgatcgcgctctccaacatcctccacgcctccgccagcctcccgcccgagtaccagaaccgcacggaggggctcctgggtgagggcggctcggacctgcctctgaggctccgcggagccagccggagctcggacccccacgccggcggcccgggcagccctgctcggcctccctttctccgcctccttggagcagaacccttggggcacagagcgggccgggagccgaggggcttctccagcctcccccgaggctcccttcctgtcctccgcccgctctaagggagcatcagggggggctgcggggaggcggggggcacagccatcctttctccctttcctcttgcctcccacatcctcccgccctcctccaccgctgcccgcgtttcctcccgcccctcccgaaggcagacgggcagggtgtgagggcccgtcctcccggctcccctggaggcctgacagcaggtgcaagagcagaggctgccaggccctggcctctccccactgcgtccgccggatgctccccaggaaggggacagccgcgtgcccagggtggccaacctcccactctgtccctcaggggtctggaataacaatccagaggacgacttcaggatgcccaatggctccaccattcccccagggagccctgaggagatgcttttccactttggaatgacctgtgagtctgggcagggtcctggggcagaggggcaggtgaggggagccggtatgtttatgtcgtccccctcggccctgtaggaagcagacctccatcctccctaaggtctgaggaatctgtgcccccccagggctgtccccaccaccaccagcccacctgcctctctctacctggaggagagaatgggggacgtggagtgtcctctctcactgcagcaggtgtttctagactcagaagctggaaaccgctctggccctgcactcccaccgccccgctccaagccatctaaagtgaggggtagaggtggacacagatggaataaggctgagtgccatgcctggtaccaccgcgctctgtgtgttacagggcagatcaacgggacaggcctccttggcaagaggaatgaccagctgccttccaacttcacccctgttttctactcacaactgcaaaaaaacagctcctgggctgaacatttgatctccaactgtgacggagatagctcatgcatctatgacaccctggccctgcgcaacgcaagcatcggacttcacacgagggaagtcagtaaaaactacgagcaggcgaacgccaccctcagtaagtggcccgaggcctggggaggccttttcagagtcgggagcagatgaggagctgcccttgcctgaccctgcttttccctgtgcatctgcattcactgagcagattcttccactcctggcattcctctgctcaaacccttcagagacttccctggctctctccatccttgcagtggccttcggcccagttcagcttctcagagctcttctcctagtgctggacgccttcccagccccctccgtccatcctagcgctggatgccttcccagcccccttcactccatactagcgctggacgccttcccagccccctccactccatcctagcgctggaccccttcccagccccctccatccatcctagcgctggatgccttcccagccccctccactccatcctagcgctggaccccttcccagctccctgcactccagccccgcaggctcctctgtgttcttcaaacacgctaggtgcgctcagctcccaggcttcacacgtgctgttctcttgcctggaatacccttccttccctggacagccacacgcttgcccctcaccttctttacgtcttcattccaatgtcccctccttggtgaggcctctcttggccgccctgtctaaaatgtcacattcacccacacttcatgtttgccttccctgctttatttttttctccttagcatttataattactcaacatattttataattttcacaggtatctttttaattattcattcatgactgtatcctcaccacccagaacagtgccagccacttagctcaataaatgtttgttaaatgactgactgaatgaatgtgtgaagcaactatgaaatggaaatggcagggctccgagaaacagacccgtgaagaggtttcactccctctctatttctggacaaatgcaatgtccctttagatgtgaccctccaggttttgtgcgtgtgtgtgtgtgtgttgacggagtttcgctcttgttgcccaggctggagtgcagtgacgtgatctcggctcgtcgcaacctctgcttcccgggttcaagcgattcttctgtttcagcctcctgaatagctgagattacaggcacccgccaccatgcctgactaattttgtatttttagtagagacagggtttcaccatgttggtcaggctggtcgcgaactcctgacctcaggttatccaccggcctcggcctcccaaagtgctgggattacagacatgagacacccagcacccttcaggttttcagccctttgccaaaggtacaaccctttggtctaagggtacaaccctttgtaatggtccaaacaaatctgctctctaattcactttttgtcatacccagcatagcactgtgttcaggaaagaatctgaaaggagctctttttgaggaggtggggggagagaaagaggctaaagatttggctaggtgggcagtacagtcccagcctgctgtgcgtcagtcgagagcaggtacacagaataattccttcttccagaggtgggtcacagtcctgggaatgcctcacacatattagagttgagaaagagaggaggctgataaagcaggagactgtcctgcctcggaacccccattccctctttgtgtttcagatcagtacccgccctccatcaatggtggtcgtgtgattgaagcctacaaggggcagaccacgctgattcagtacaccagcaatgctgaggatgccaacttcacgctcagagacagctgcaccgacttggagctctttggtaggactatttggctggctggggagagtggggaggtgggtaggggatgaggtcagagtcaaatttgggaaattctgcattgctacacccagcaacacttgctgtcactctttcatttgaatatccaggaccggcatttccgaggagcgatatctataactcaaataggtgccccccagtaagtagtagtgacgggcttacggcggtttggccagatagctagagtgactctgggcacatagaactgattcaaggctgggcgcggtggctcatgcctgtcatcccagcgctttgggaggccgaggtgggcggatcatctgaggtcaggagttcgagaccagtctggccaacatggtgaaaccccgtctgtactaaaaatacaaaaaaaaaaaaaaaagccaggcatggtggtgcatgcctgtaatcccagctactcaggagactgaggcaggagaatcgcttgaacccaggaggcagatgttgcagtgagctgagatcgcgtcactgcactccagcctggtgacagagcgagactctgtctcaaaaaaaagatttgaagatcatttaatctcaatctgatcatatatagtcatctttagtcattatgcattcaccaaattattagaataatcaagtgcaacatttaaaatgaccaatttacaacatttttatatctattaaaggaaggctctaatgtaggacaagatttaaagaaatatgaaaaatactttcgtttggtacctttcttgctctttttgtctggcaaccatgtttacctagccgtgtctctccttgtctggtttcctgggctaggacccagtagagtgccatcgctccctctccgtaaaggtgttagagaccccgagccctacatccatgatcagggccaaaggctccaagcacaagggacgctgctttcgtctgttgccagcactaattcaaagggtccaagggcatcaaagggatgccactttctgtctgttgccagcactaattctgagggtgactgttcttggctaaaccaaagccccggggggcatattttgcgttctctttgcctctctgcctgatgttctttctctctgtgtctcagaagggactgctttgcctgcatcccttttgccccatgtgcgtcctcccaggtgcgagacaatggcactgagaggttttcttctccacgggccccacccctgaaggacgatggtctggaaattacgttcgtctattctctgtcacttcctttcaatctgctgttttaaggagactttcctattttcttgaaaaatatcagtttgatctgaagatatgtagtagtgtttcactacagtctggtgtctgaagggggtgtctgggaaaggtccaggaagtggggggtgggtgagaaatcagggcaaaggatggggctgccgtgagagtgaagccagtttggccggcagcgcagcctggggaggtgtctggaggatcctggccttgatcctccatcccccaggatgtcccatcctggtgtgagcccagccagggctgccctttggggtttcttcaggaggaaactgctttcccctctgtggcgttccccgctacaatcagtatgttggactggtgccacgtccttccagctgggagcgtgaccaggatcacccccgataccagccttgctcaaaggaaatgaccaatgagatttgtctggggagggggagggtggcctgagaggggtgggggaagccccgtatcagcaatcagaccacagagccgaggagtctcccagctctcaacattctcatcttccccggggcagagaatgggacgttgctgtggacacccaagtcgctggagccattcactctggagattctagcaagaagtgccaagattggcttggcatctgcactccagcccaggactgtggtctgccattgcaatgcagagagccagtgtttgtacaatcagaccagcagggtgggcaactcctccctggaggtgagtgttgggaggtgggggaggagtttctgtgccgaggggagaggaaatgggagtggaatggatgctgtgattctgcctgtcctgggtgtgtctgtgttgggagatgggtggagcagtggtaggtgagtagagcagattccagtctcaggccacaaactcacatgggaagaaagagaactttctggccgggtgcagtggctcacgcctttaatctcagcacttttggaggctgaggcaagcggatcacaaggtcaggagatcgagaccatcctgaccaacatggtgaaaccccatctctactaaaaatacaaaaattagctgggcgtggtggcaggcgcctgtagtcccagctactcgggaggctgcggcaggaaaatcgcttgcacccgggaggtggaggttacagtgagccaagattgcgccattgtactccagcctgggcaacagagtgagactctatgtcaaaaagaaagaaaagaaaagaaaagaaaagaaaagaaagaaagaaggagggaaagaaaggaaaggaaagaaaggaaaggaaagaaagggaaaggagaaaaagaaagaaagaaagaaactatattggagaaaaagaaggacgaaagaaagaaaaaggaaggaaggaaggaaagaggaaagaaccttactttattgcttatagttcaactggatttttatctcccacctccccttctgccaggttggcaggaaacttccacctccgtctttctcacagcgccccacagctctgcggcgaagcccagcagagggccctgcggtgtggggtggaaggtggttgtgggtccctgggcgtgagtccacacaggtttccatcacagctccgccccacttccccttcagacccagggagaggctctgctgcttctgtgccttgctcagacacaggacaccttttctgaggccgcttacagtcctgtctgcctagaagcaccccacagtcatttctccctaggatgtcatcatcacggtgctgggaagagagctgcgggtccctctatcttgacacctccaagcccctttgctttctcttttactatctccttccagctaaaagaaacatcttttccagtttggagaaactacttctccatgtttctagccaagatacttggcctaattccacgactcttgtcctatctgcttttttatttttatttttggttgtaaaggaagagccagaaaggaaagtgtttatctggcaacacaaaactacctccttcaccacttacacacacacgcatgcacacgcacacacagacacacacacacatccttctgaagcatgagcagagaatgggtactcgaaagggatagaggtagggacggttggtggggtagggggtagaaaagcataaaatacacaatgggaaaaagagattgaaatcaatatactattccacagatccccaaatatccactcttgggagtagcaagtgttagaggattccattttagggagattccccgagtcgcttcagtaagggagttagaaaggggagcgcagggagcttggtgaggtctcggcgccgcagcctttgctgagctgctgtactggctgctgtgttttctcacagtgctcagcagggaggctctgtcttcttggtttgggagtcagcaagggaggtcaatttcagcttatatgaaatccagtttgcaggccacataggagcctgaggcaggcggattgcttgagctcaggactttgagaccagcctgggcaatatggcaagaccctgtctctactaaaaatcaaaaaattagctgggcgtggtggcatatgcctgtaatctcaagtatttgggaggctgaggcacaagaattgctttaacttgggagggggacattgcagtgagccgagatcgagacactgcactgcagcgtgggaaacagaacgagactgtctcattaaaaaaaaaagcagaagaaaaatacaaaaattagtgggcgtggtggtgcatgcctgtagccccagctcctcgggaggctgaggtgggaggatggcttgaacctgggaggtggagtttgcagtgagccaagatcaagacattgcactccagcctgggcaaccgagtgggaccctgtctcaaaataaataaggaatccagttttcaagcaataggacatacatggatacatacacacatggatacatacacacatggatacacacatatggatacatacatggatacatgcatacatgcatgacacacacatacatacatggatacatacatggatacatacattgatacatatctacatggatacatacatgatacatacacacatggatacacacatggatacatacatgcatacatgcatggatacacacatacatacatggatacatacatacatggatacatacatctatacatggatacattcattcattcattcatgcttcaatcattcatgcatcccccatcttactctagaaaggatttcaggcaaagagctagagtgtgagagggaagaggctgagatcctggtgcagggccaggcagggggtcagggtaaacaatgacccagggaggccagctgggcaggactaccgtgtggctttaggcagggccttgccgccccacggcctggtcaagaaggtgctcagcaggtgctggtggggctgagacatgactcagggtccacgggttctcaggccaaaggggtcagtcagaaacacccagaagcccttcccagtttggtctcctggccgcccgtgatcggcaaccctcctccaggtggctggctgcaagtgtgacgggggcaccttcggccgctactgcgagggctccgaggatgcctgtgaggagccgtgcttcccgagtgtccactgcgttcctgggaagggctgcgaggcctgccctccaaacctgactggggatgggcggcactgtgcgggtgagccgggaacagggcctggagcaggcgcttctgggagcagctgatagctcaagggtgtagacagccaaaggcaaaccatttctctcctttttccagcagatctttagaatgctcaatctaggcaggtgtgggaaatctaggcaggtgtgggaaatcatctaggcaggtatgggaaatctaggcaggcctggaaagggggtggtggatggtgtggggctgaaggagaagaggttgtacaggcataggggaggggacggggctgggcatccctgaggcattgatggggggagccccgggcgaaagactgaagatggtttggggaggagacttcagcagccgccagagaaccgggcaagctgggtcctcgggatccctggggatcttcagagacacgaggctcaggatctctgcatctcacgagtcaggacgtttggaggggctggcgtggggatccggcagcaaaggtgcctgattttccctttgagtcctcccagccatctgttcctcccgctctgagtcaccagagtctgatgagggagatcacagcgaggcctttaccaagccccctaaggcacccaaataaaatctacagatcactgtgccttcagagccgaggccagagtgggtagaaccgcagcttttataaaggcagaaaaggagatggacgtgagaggggagggcgtgaggaaagccagctgggggcccctcctctgccagccttcggggtcctttctgaagcagagggtctgagaaacactccagtccctccacaaaagtggaagaatacctgtctggccggggaaaggggttgccctgcagagaaacgcctggaaaaggggggaaggatggtttggggttccgagtggcccgaagtggaacactgggggaaagcaagcctgtcccggagcgggtttccacgggctgggccgtccctctgctgccctgcgcgctgctgctgacctccctactcactctgcagctctggggagctctttcctgtgtcagaaccagtcctgccctgtgaattactgctacaatcaaggccactgctacatctcccagactctgggctgtcagcccatgtgcacctgccccccagccttcactgacagccgctgcttcctggctgggaacaacttcagtccaactgtcaacctaggtaccgccagagaccccgccctctcacccccgcactcttcctgggccccaccctctcacccccgcactccgcccacctttggggaagatgaggaagctctggggtcacaggacagagctccagatttctctgggatggtgtaaggtgcgggctatgggagctggcgaggcaagctgtcacggcaaggaccacgggcctgtgtggcctatggaggaaggacggaggcagagacctcacagctggctcagtgagatgagcgctggggaggcccggagcatagtggagtgagccctagcgtgagggccacttctcccggtttcttcagcaaccttctgtcactgtggaatgtagggtgagggccacttctcccggtttgctcagcgaccttctgtcactgtggaatgtagggtgagggccacttctcccggtttcttcagcgaccttctgtcactgtggaatgtagggtgagggccacttctcccggtttcttcagtgaccttctgtcactggaatggagcagtcaacttgggctggcccgacagactttttgggtaagtctgggtaaaccgtggggtgatgatacatttgcttctcccatctccagaacttcccttaagagtcatccagctcttgctcagtgaagaggaaaatgcctccatggcagaagtcaacgcctcggtcagtgctgcaggccgcgctctgggtgggagggggcgcttggcgggttcaggccagggcggaaccatcgctgtgcggccttcatcttgtcatccatctggattcaactgccagaggaggccggagcctcttgccccatgggaggtgcagggcattaggaagtgaggaaggcccaagacagaaacctcgactcatcataagcagaggccagggtgccaagtcaccccagccgagacctctaagcatcttggttatgatctgaaagaaactaaaggacatttcacctcccgggagtcttccctgacttcccagagggaacgggcggctccctcttcttggctgccatgccatacctcagtcacaggcaaagtggcacaactgctgagtggttggggctgtagaatcctgcacacccagaatcagaatccctgctctgcccctcactagagcaggtgtgctaactagacacatcatataacaggtcatctgtaaacacagggacaatcatagcacctgagtcaacaggccgtatcaccgtttaaatgataacgcgtgtcaagcatttagtccagtgcctgacacacaagtattcaaacatgatgactgctattatcactactgcaagcctagcactccccactccacactccacacggtaaaatctgttgacatttgtcacctgcgccagacaatgcactctttgagtttagactccacctaagtcaccttgacacccccagccccgaccatctcctaggtctaaacaacccatgttcaatatactggggaggaggtcatgagtcatgtgtcagaggcaaggtaggggccattcatgtcagattctctgctcgtcatatgaggctgagggggggacagaatggaaaacccttcactctcaacaaacattattaagcaaggacccatgacactcactgagctaggctagagtgcaagggtgcagagacaggtgaggaaggtgctggggtcctggggctcccgttccaggaggaaacagggatgaatacacccatcaaggtgggagggcgtctcccccccggatggggcctcacccccacccccatctgccatcctctaacctaggtggcatacagactggggaccctggacatgcgggcctttctccgcaacagccaagtggaacgaatgtaagtgggactgtgtccccctaagcccccagatctcttcctcatcccccacccccagccccccaccccccctcaccgttgccctcccacacagcgattctgcagcaccggcctcgggaagccccatccaacactggatggtcatctcggagttccagtaccgccctcggggcccggtcattgacttcctgaacaaccagctgctggccgcggtggtggaggcgttcttataccacgttccacggaggagtgaggagcccaggaacgacgtggtcttccagcccatctccggggaagacgtgcgcgatgtgacagcccgtgagtccgtccattccggggacactatgggggtcactgcggggggcgggcaaacagaggtgcttcagcccacacaaacaagctaattgagtttttctgtttgtttggttttgagcgaaaacgtgaacattttgtccagctgctttttagattcgagagcaggagcagccagcactgctgaggcagtcacacgtatacagcttcacggagcaagcacccagccagggccttgctgactgtggctgctaataaaacagcagcaatttagtttcataaaattgctaatagttttcttaaaatgccattgcacttaagcatacacagggacacccccatcgtctctgctctccagcgggaggatatgaagctggagactggagactggccagggacagaggcaactactccctgaaatggtgtcaccctgtgcaagcaccttccccaggccaggccaggcctcaacaccccccagcaccttccccaggccaggccaggcctcaacaccccccagcaccttccccaggccaggcctcaacaccccccagcacctccccgaggccaggcctcaacactccccaagcaccttccccaggccaggcctcagcacccccatctgaaaatgagatgggatttctgagccccctttcagtgctgacagcccccggttttcctggaacaggaataagttggcaagcttgtcagagaaacaaaggaataacacgtcctattttctgtatagggcagagaacagggcaggggccgccccaaacacaacaggaactgctgttttacttgggtctgggaccaagcaagagcttctcccagaatccaggctaagcccgctctctcccggagcagggggtgaaatccctcagaactactgtatgttggggagttggggtaggaggcgcagggaggcaagccctgactatgcaattaaggaaaacctataatttttattatacaagcatcgtatgtttattgcagaaactttaggaaacacaaacttaacaaaaagaaaagaggaaaaaaaccctgtaatcccaatccccagagagacaacagtatttcctacatatccttctgaactttcttttatgcctaggaaccttcagacatccattttttactgaaggatcaaatcattcctaatgttggaaaacctcctcattaaacagttgtgaacaggttgtctcatatattctgtccacattcccatttgacatattatgatggtatgtttgaatatagtgtcatattttaaaatacattataataatcattaccattgtttgagtgcttactgtgtgtccggcactgtactgagtactgtggacacattatctcatttaaatctcacagcagcataagtgctattatgatcatttccttttaaagataaggaaactgaagctgaaagagtgaaggaatgttccctgaattacacatctagtcactagcagagtttcagtttccacccaagtctggccaccttcaaagcatgtgctcttcaggaaagcattttccataggaacctttttccacaggaacctttttccctaggaacctttttccctaggaaactttttccataggaagcaccatcccttggtaaggatgtgcagtagtttatttaaccagaccctacttctgaaacgttactattatccaccatgctgatctgaacgtccaggggcatatgtatctgtgcacttctccaattatttctcaggataaacacccgaaaaggaattcgtggctgaaaaggtactgatttagtgttcatcggttgctttctgtgttaatctgtgtccttcccgacagtgaacgtgagcacgctgaaggcttacttcagatgcgatggctacaagggctacgacctggtctacagcccccagagcggcttcacctgcgtgtccccgtgcagtaggggctactgtgaccatggaggccagtgccagcacctgcccagtgggccccgctgcaggtgcatagggctgtggccaggaggtggaggacagtgctggggaacccaagctgggcaagacactgcaaggggtccaggaattaggatggctcgagagatcagagaccagggaagagaggacagtggaaaaggagagttgtgagtgcctgctctgtgtggagaataaaggcgctatattacaaactctgaaacccaaaagagccataggggggcttagaactatttcgaagatgagaaaactgcagcttagagatgacaaggaacctgccccaggacgcagtaggttaagcagcagggcatggtttccaaagccaaacattttttatatttttatgttttgagatggagtgtcatttgtcgcccaggctggagtgcagtggtgcgttctcggctcactgcaacgtccttctcccgcgttcaagcgattctcctgcctcagcctcccgagtagttgggactacaggcatgcaccaccacgcccagctgatttttgcatttttagtagagacggggtttcgccatgttggtcaggctggtctcgaactcctgacctcaggtgatccgtccaccttggcctcccaaagtgctgagattacaggcgtgagccaccgcgccagggcccaaagtcaaaccctcccacctgatctggctgctgcttccctgctgtctccttgtgggaaaagaacctgcagtcctgtgtctaggccagtcctgcccctcagtcaagcgaggcgcctttgcccctgccctcatcagcagtccccggggctccgctggttaacagcgcaggaagccgcggccccacgcagacctgggctccgggccctccgccagctgcagttccagatcccgccgaaggagggggcgggcggagcgcgggtggggcggggcccggctctccgggtgggcggggcggggcggggccgggctggggcgggggtgtgactgcgcatgcccacctgtggccggcatccctgccgcccaggtgcagctgactgcacgtgcagctgaattcacaccaggtttttgtttttgttttttgagacggagtcttgctctgtcccccaggctggagtgcagtgttgcaatctcggctcactgcaacctccacctcccaggttcaagcgattctgcctcagcctcctgagtagctgggattacaggtgcgcaccaccacgcctggctaattttgtatttttagtagagatggggtttcaccgtgttggccagtctggtctcgaacccctgacctcaagtgatgcgcccgcctcagcctctcaatgtgctgggattacaggcgtgagcccccgcgccggcccaggcccatgtttttaaagcccacacctgcctcctttgcccagtggtctcacttcagcacggcctcagggctgactcagtctctccggagagtggggcgagcccagcctctcctacagaacctcttcttccccagcagaagaggaggggctgggaggctgagctcccgcctctgaccgcctgtctgtctctcttggtcaccagctgtgtgtccttctccatctacacggcctggggcgagcactgtgagcacctgagcatgaaactcgacgcgttcttcggcatcttctttggggccctgggcggcctcttgctgctgggggtcgggacgttcgtggtcctgcgcttctggggttgctccggggccaggttctcctatttcctgaactcagctgaggccttgccttgaaggggcagctgtggcctaggctacctcaagactcacctcatccttaccgcacatttaaggcgccattgcttttgggagactggaaaagggaaggtgactgaaggctgtcaggattcttcaaggagaatgaatactgggaatcaagacaagactataccttatccataggcgcaggtgcacagggggaggccataaagatcaaacatgcatggatgggtcctcacgcagacacacccacagaaggacactagcctgtgcacgcgcgcgtgcacacacacacacacacacacgagttcataatgtggtgatggccctaagttaagcaaaatgcttctgcacacaaaactctctggtttacttcaaattaactctatttaaataaagtctctctgactttttgtgtctccaaaa

SEQ ID NO: 758 - DNA, 1866 bp, Homo sapiens
gcattgctacctgcccttctcaaagcccacatgttgtattttatgcaaatctacagattatctatcattatctaaatgcaggcatctgaaaaccagcagtaatcctgcctctgaagtttatcaggaaaggagcttaaaagagaaccaaattcagcctgtgttggaactctcagtcccagaggggtgtggtttgtagctctccggcctgctgttggacttaggctgtgacccacagaaggacgccagaaagtactcaagacattcacggtgccccggtcagcactcgccatgacgaagacttctacatgcatataccacttccttgttctgagctggtatactttcctcaattattacatctcacaggaaggaaaagacgaggtgaaacccaaaatcttggcaaatggtgcaaggtggaaatatatgacgctgcttaatctgctcaagaacaggactgctgggtttgacatctaccagccaggaagctttaggcagctcttgcagaccattttctacggggtcacctgcctggatgatgtgctgaaaagaaccaaagggggaaaagacattaagttcctaactgccttcagagacctgcttttcaccactctggcttttcctgtatccacgtttgtatttttggcattctggatcctctttctctacaatcgagatctcatttaccccaaggtcctagatactgtcatccccgtgtggctgaatcatgcaatgcacactttcatattccccatcacattggctgaagtcgtcctcaggcctcactcctatccatcaaagaagacaggactcaccttgctggctgctgccagcattgcttacatcagccgcatcctatggctctactttgagacgggtacctgggtgtatcctgtgtttgccaaactcagcctcttgggtctagcagctttcttctctctcagctacgtcttcatcgccagcatctacctacttggagagaagctcaaccactggaaatggggtgacatgaggcagccacggaagaagaggaagtaattgcacaccattttccaagaaccaagaaagaagaaaacacaagagatttttctcatcttttttttttttttctggtggagggaggtggtggaggaacatagcaaagtaggagggacagagagtgatacttaaatttaataagaggttcgtgaaggtagcttaacttgagaactcttggttttttgaaaggttgactgcacatgccaaaaacaactcctgctatctcagaattaattatctttgaccttcgtggaggatggtctctggttaaaatctggccaaagaaactcacataaacttggtgttagagaacatctagagagagagagaggaacttagagtcatttaaactcttcagtttacagagaaggatgctgaggacctagatgagaagttacctgcaaaaggcaaaagggttacttagtgtcagaaccaaggcaatgacttctctctcccagatctcctagctactggtcctgggccatttttttttttttaaataatcccaactttctttaaaagacaagcatttcagtaagctagttattttcatgggttgctcatccatttttttcagtgatctaaaaatgtagggagatggctactactgaagttgtctgtctacttgggataatagcaaattaattgaagacaatgggaaagtaagttataaaaaatactgggaaatctgtttctcttctgagcaagcattcagggcaggtataaacatcaaacatagtgacattgtcaaaacctcttccatttgaacattgattaattcatcaaataaatggtatagtaataaattttgcttgcagaagaaaaaaaaaa

SEQ ID NO: 759 - DNA, 9537 bp, Homo sapiens
ggagcccggggcgggcgagggcgggggtgtcccggctataaagcgtggccgcctcccgcggcgctcgggacagccgtaccccgggcggtcggacgggcgggcgccggtgggagctcgggccgtgcccgctgagagatccagagcgctccgttcccccggggccggagcgggggcgggtgggggcgtaagcccgggggatgctgggctcagtgaagatggaggcccatgacctggccgagtggagctactacccggaggcgggcgaggtgtgtcctcggggatggcggagcgggaagttgggggcaggtatcggggtgtgggctcacatggagcagggactggttgtgggttcaaatggaggcaaaggcgtctacttgggcagctgaggaactgggaacacggagaccaggtgtggaagtcggggaccggggacgaggcatggatgggagcgctgtttgggcagcctcgccgcggccagggcttaaaaatggaagtcaggaaaatttagccaagggtcgggtcacaccttaaacttgggagccgggtgttggagccccaaaaagcaagggatttatatgtacaaaccaaagataggaatcagagttccagggtaggggacagactagggggtttcaggatgtgaggttcaaagttggagggaaagaaagactaaaagatggaggaggagtcaccattaaggggaagactgaggtgggagctcagggccagcacacagtgttaaagaaccggggttcggggctaaggatcagctggtaatctaaggtagggtcagacatagggattggtgctcaggggtcagagatgggggtgctcagagatgaagcttcgtttttggagtctgaaataacaggtggcttagagttgggcatctgggagcagaagatgtagccatcagcattggcaggagaggggccgatctccacccccccatccctacccatgaccctccgcagggactccccaagtcggaagatggagagttttagattgtgcaccttcccctgctccccgccagtccagcaacctccagctattgctaaaattcccatccagtctcacctcagacaaggcttccctggagtggggggtggcggcatattctaatcccctcacctggacagacagaaagtccttcctcaagtctgacccccattcgtcttgctgcaacgacccctacaccttagctacctcactctgtaatcaacgttgtgaggttgttggggctgggggttgggttcttggtctgagaattatgggggtctggacacttggacttctaacctggaaggggactgtgggcttgaggtggggtgtggggcaggaatggctaggttctccaaggagtcaagatctggtgactgcgggggccccagtgtgcctgagtcttgggtctggggctcgaaactgtagggtgggactcctggatccccaggccttcagggctgggcaaggtgcctgggaagggccagtcctgggtttggggaggtgtgaggtgcacgtggggtggggcagggccaacagggaaagggactgggagtgttgagaggtggaggcagggtggctggaggtatcagttgtgagatgcggaaggcagagacccaggtgggaaatggagggttccaggtagtgggggtgatcccagctggacctctgcagaactcagtctggggacctgatttaagggaaccacctacagaccaattgtacaaaccaactacagttgttttgggggcacatcttaagtaaatgatgggggtctaggcaggaggagttgatatttggggcacagtctgaatagatccaagtttaggggacaatttgtatggaaattgtgtcagaaattgaaggaaagccggcacagtggctcacacttgtaatcccagcactttgggaggtcgaagtgggaggatctcttgagcccaggagtttgaggccagcctgggcaacatagggagaccttgtctttaaaaaaaaaatttttttttaattagtcaggcatgcctgtagtctaagctacttggttgggaggctgaggtgggaggatcacttgaggctgggagttcgagctgccgggagctgtgatcgtatcacggcactccagcctgggtgacagaatgagaccctatctcaaaaaataataatagtagagggacagtctggaggtaatcagcatttcagggcatattttgggagagtcagtatttggaggaatggaaatggttgggtgatactgtctgaggctctccccagccttcccatcagataagcccacctcttccccttgggtcagaacaatggggagagaaatacctacactcagccagcaactgagagctgagagggtccccaaaccacttcttgcccatagcaccctcccgcttggggtgacgttaacactcagggcagcttgctgtctggaaagaacttggaaagttaccatcctgggatatccctgttggcctcaggttcttgcagatcagctggtccagctgctcccctgttttagaggtggttaactctgaagccccgcacgcagaacactggggtcctgggttgggtctgggactagaaacttggcttctggcttcacactgccttcctctgctccctgtcacacccttctccagagacaataaggaaatgaaagaggagaaattccagtctcctggtgtgggggtgcgggtcccccaagggcttccccccaatctcagccccaccctgtcaggggagatccggctcagacccggacaccaggggttcatcccagccccggggcgtgggaaagcctagggtggattagggcagctggagtgcttgaggtcggacctcaaggaggacttccgggtgggtggggagccagaaaggagggccctggggtccctgtctgtcttactctgcaataccagagagcctgactgggttgcagaaatggggggtggaggtatagggggatttggaaactctgtggacccctctaatccatcaccttctcacctcatcccttttctttttctggggaggggacccgaagccaccaaccagcgggagagcctgcatgggggaagggagtaactgtggctgcaatttcactgtaagacttggggtgagggggaatggatttgttgaagggagggagatagatagatagatagatagatagatagatagatagatagatgcatggatggatggatagatagattgataggaagatggtggctcgtcatggtagctcatgactgtaatcccagcactttgggaggccgaagagggtggatcacttgaggtcaggagttcaagaccaggctggccaacatggtgaaaccccatctctactaaaaatacaaaacttagctgggcatggtggtgcatgcctataatcccagttacttgggaggctgagacaggagaattgcttgaacccaggaggcggaggttgcagtgagccgagatggagccactgcactccagcctgggtgacagagtgagactctatctcaaaaaaaaaaaaaaaaaaagacaagaagatgggctgaaggaggaagaaaggtgggagttggggttgggaggggagtggggtagagtcggatagtgagagagagtgcccaggaagggagaaagagatggaaggatggagagagagacaggggccgagatggaggggaaagaaagatgggagaggactcgggaggggtcgagggtgggcaggaagagcaaaagaggttagggtggagacagaagggaaaacaatgcgggggtggggagggagatgggagaggggaatatgggtactagtactgagacgggtaacacaacggcaaaaatagccaacagagattcaaagagacatgatgaaagagttccttggagagacatgaaaaggaaagagcagaggatttctcgactggaactcagacttagggttgagttggttgcctccactctctgattccctaagccaccctggccagactcgtttctccggaccttgtgacctgcagaagcttacagtggtagggccagacatggtggctcatggctataatcccaacactttgggaggccgaggcaggaggatcacctgaggtcaggagttcgagactagcctgaccaacatggtgaaaccctgtctttactaaaaatacaaaaactagctgagtgttgtggtgcgtgcccgtaatcccagctgctcgggaggctgaggcaggagaatcgcttgaacctgggaggcagaagttgcagtgagctgagattgcaccactgcactccagcctgggcgatacagtgagactctcttaaaaaaaaaaaaaaaaaaaagcttacagtggcaggagactaggcggtatccagttaactcacatttggtggctctagccagtgctgtatatagcagcattcccccacccacgcagtgccatgagaccccaggcctcggaggaggcagtggggaaaggtccaggtggagaatggggcagagaggatgggagacagtggttgagaagggataagtagatacaaagaaagaaacaaccttccagcatgcctatgttttcctggcgtgttctgttcactgttgtgttcctgctagactgttggcaccacgagggcaggcatttctgtctgtcttagtcactgcttttattttattttatgattattattttttgagatggagtcttgctctgttgcccaggctggaggcagtggcacgatcttggctcaccacaacctctgcctcctgggttcaagcaattctcctgcctcagcctccctagtagctgggattgcaggcatgtgccaccatgcccggctaattttgtatttttagtggagacggggtttctccctgttggtcaggctggtctcgaactcccgacctcaagcgatccgcacccccaccccccccacctcagcctcccaaagtgctgggattacaggcgtgagccaccgcaactggcctagtcactgcgtttatagcgtgacccggaacaggtctggagccagactgcctggttgcagaatcccagttctgcccccattcttgctgtgtgaccccagcaacctctctgggcctcagctagctcagctgtaaaatgggcatcatcataacacctcctcccatagtatggttgtcaagattaaaggagaccattcttgtgaagtgcttggagcagctaactgataaatattggttgaatgaatgaaagaatatacagagggttacttaggaggcactgcaagatctaccgtgttccattgacctaggatgcaccttttccccccatttgaacatttccaaaaatgggatgcattttacagtcaacagtgtcctatgattttaactgagtgtttttcccatttgtattaatatataaagtaatgctgcagcttccagagaagtcttagatttgaagatatatagtaaatggataatattattaggttgaaaagtgatttctgatattcaaacacttttatgtataaatacagtaatttatttttatttatttattttttttttttgagacagagtcttgctctgtcgcccaggctggagggcagtggtgcaatctcggctcactgcaacctccaccttctgggtgcaagcaattctcctgcctcagcctcctgaatagctgggactacaggcgcccgccaccatacctggctattttttgtgtttttagtagagacagggttttgccatgttggccaggctggtctcgaactcctgacctcaagtgatccacctgcctcggcctcccaaagtgctgggattacaggtgtgagccactgtgcccagcctaaatgcagtaattttataagctaaaagattgaagagagctacacatatatgttagatatgttagattattacagagttataataactttttttttttttttttgagacagaatctcactgtcgcccaggctggagtgcagtggcatgatctcagctcactgcaagctccaccttccgggttcacgccattctcctgcctcagcctcccaagtagctgggactacaggcgttcgccaccacacccggctaattttgtttttgtatttttagtagagacagggtttcaccgtgttagccaagatggtctcgatctcctgaccttgtgatccacctgcctcggcctcccaaagtgctgggattacaggtgtgagccaccgtgcccggcctataataactctttatgattactaaaattgagaactgctgatttacctaataaaccagcagttattaaatgttttggtctcaggaccaccccccttcttttttttttttttttgagatggagtcttgctctgttgtcctggctggagtgtgcagtggcatgatctcagctcaccgcagcctcagactcctgggctcaagcgatcctcctgcctcaacctcccgagtagctgggattacagtcctgtgccacgatgccggctgatttttgtatttttggtagataacagggttttgccacgttgccaggctggtcttgaacttctgacctcaagtgattcaccctccttggctcccaaagttctgggattactttgggaggctgaggcaggaggattactcgaggccaggagtttgaaaacagcctgggcaacatggtgaatccccgtctctactaaaaatacaaaaaaattagctgggtgtgcggtgcatgcctataatcccagctacttgggaggctgaggcaggaggatcacttgagccccagagtttgaggctacagtgagctgcgattgcaccactgcacttcagcctgagtgacagagtgagaccctgtagaaaaaaaaaattatttaggagtccaaacagtttctgttgatgtgggttatgtctatctacgtttacagtatttacaattaaaactgagaaatattacaaacatgtattcatttaaaaatagcaatcatttgttagtgtaaaagatttttattaaaaaaaccaaatttcaaaaaatttagtcaaaagagcgacactgtttttttccatttttgcaaatcaagtctggcccagtggaagacagctggattctcctggttgcttcttcattctctctgttggaatatcaacaccccctggaaaactccactgtacacttcatgagaaagagagtgaaaagggctaataataacttaggattgcgggtgtggtggctcatgcctgtaatctcagcactttgggaggccgaggcgggcagatcacgaggtcaggagttcaagaccagcccggccaacatggagaaaccctgtctctactaaaaatacaaaaaaaaaaaaaaaaaagctggcgtggtggcacacacctgtaatcccagctgctctggaggctgatgcaggagaattggttgagcccaggaggcggaggttgcattgaggtgagatcacgccactgcactccagcctgggcgacagagcaagactctgcctcgaaaaaaaaaatagcattattttgaaaatagttttgacttcgtggacatcctcaaagggtttcagagactgccctgggagtcccgaaccctggagaatcacttaaaggatgatgttgagtgtatgggagcatggtgggtgggaaagcagggggcagaaagggcgtgtccagggagtgaggagagaccttgagagactgctttctacagatagaggtaatgatggaagggatttgtagagaaggcaagatggacagacagacggacactcagtgggtcctgggatcctttgctgaccagcagagtggagccccactgacccctcctttcatctttcccctaggtctactcgccggtgaccccagtgcccaccatggcccccctcaactcctacatgaccctgaatcctctaagctctccctatccccctggggggctccctgcctccccactgccctcaggacccctggcacccccagcacctgcagcccccctggggcccactttcccaggcctgggtgtcagcggtggcagcagcagctccgggtacggggccccgggtcctgggctggtgcacgggaaggagatgccgaaggggtatcggcggcccctggcacacgccaagccaccgtattcctatatctcactcatcaccatggccatccagcaggcgccgggcaagatgctgaccttgagtgaaatctaccagtggatcatggacctcttcccttactaccgggagaatcagcagcgctggcagaactccattcgccactcgctgtctttcaacgactgcttcgtcaaggtggcgcgttccccagacaagcctggcaagggctcctactgggccctacaccccagctcagggaacatgtttgagaatggctgctacctgcgccgccagaaacgcttcaagctggaggagaaggtgaaaaaagggggcagcggggctgccaccaccaccaggaacgggacagggtctgctgcctcgaccaccacccccgcggccacagtcacctccccgccccagcccccgcctccagcccctgagcctgaggcccagggcggggaagatgtgggggctctggactgtggctcacccgcttcctccacaccctatttcactggcctggagctcccaggggagctgaagctggacgcgccctacaacttcaaccaccctttctccatcaacaacctaatgtcagaacagacaccagcacctcccaaactggacgtggggtttgggggctacggggctgaaggtggggagcctggagtctactaccagggcctctattcccgctctttgcttaatgcatcctagcaggggttgggaacatggtggtgggtatggctggagctcacaccacgaagctcttggggcctgatccttctggtgacacttcacttgtcccattggttaacatctgggtgggtctattacttactgtgatgactgctgtctcagtgggcatggtgttgatccacggggtactgtgataaccaccatggatacattttggtggcccactgggtactgtgaggactgctacattgatggatgttattggctaatccactgcatggtttgatggccaccatctcggttggccctttgggtgtgatggtgatagcatttcagtgacatcttctttggccccccccattaggtgctgtgcccacttcttttttggtgtacttggcacagtaggtgccaagttggccaccattctgtgtaacaccttttttggcccattgggtgctttgatggacatcatactgggtaggtgacaacgtcagtgggccaccatgtgccatgatggctgctgcagccccgtgttggccatgtcgtcaccattctctctggcatgggttgggtaggggatggaggtgagaatactccttggttttctctgaagcccaccctttcccccaactctggtccaggagaaaccagaaaaggctggttagggtgtggggaatttctactgaagtctgattctttcccgggaagcggggtactggctgtgtttaatcattaaaggtaccgtgtccgcctctt

SEQ ID NO: 760 - DNA, 31922 bp, Homo sapiens
tgctaatgcttttggtacaaatggatgtggaatataattgaatattttcttgtttaaggggagcatgaagaggtgttgaggttatgtcaaggtaaacaaaaccaccattgtggtaaagaccaccatgagggataactgaatatatggcttacaaaatgtttactgaataagcagaacagtctggattttcctgggcaggagggggttgggggctttgggtgggttggtgtccatggcttggtaaacatttccaagaagtaaacaaacctatcagcggccaagctgcttgtcacctgtgagtgcttccaaggaaccggatgtgggctcccccacccttaccccagcatctggcacagctgaaggcagatggaaatatttacaagtacgcaatttgagactaagatattgttatcattctcctattgaagacaagagcaatagtaaaacacatcaggtcagggggttaaagacctgtgataaaccacttccgataagttggaaacgtgtgtctatattttcatatctgtatatatataatggtaaagaaagacaccttcgtaacccgcattttccaaagagagaaatcacagggagatgtacagcaatggggccatttaagagttctgtgttcatcttgattcttcaccttctagaaggggccctgagtaattcactcattcagctgaacaacaatggctatgaaggcattgtcgttgcaatcgaccccaatgtgccagaagatgaaacactcattcaacaaataaaggtaagttcatagtaattatccatacttttttaaaaatagcataatgttgtgatagagagaacatgagtgccctattccagctgcacgacactggcatgtatttttatgtctaagtctcagtttcttcatctgtaaaatggaaataataacaagttaaccattaggattcttgtgtcagataagataatgaatgcaatgcacataactcagagtgatatactgttggcaactgataaatgataaattgatatgtactgctgtggattatgtcactgaaaattatttagttctatagtaaggcagagtcagctacatttgacagatattgtgagatgcacagatcctttgcctgattttacccttggcacgagtcagactctccttttattctcctaataggaacccccttccctgtgatcctaaaaggagccccagatgcaaatctctgatataagaacaaccctgaccttctgatgggagaaaaccttgcattttatcagtcccaattcaagggatcctttcagagatttcttgctacctcttatgtagcagaagggaaaggaagaagacttcctgtcctggcaggggtatctataccattgaagaaggtcttgtacaacaacaaacagctaaaactaagagggaaatgctttataaaagaccgccctggaatctggctgtaacacatccagaggcagtgctgtactagtaacagtattagtctgtaaaatgggaataataataataaatatctcccttatcagattttgtgaggatcaaagtttaaaatgcatgcatataaagggaagctgggtggagtatgtaagaatacggtgcaatactttgcatgtcttctgttcatctaaatttatctcagaactttaaaaaataactttaaaaatgcatgcatagtgcctggtacatagtaagagctcaataaatggtggatatagtcattggctctctctagatggaaaattaatagaacaagggcccagagggatttccccagagatccactgctctaagcagaggcaaatatagaaagataatgtttggaaagaaaaccatctctacagtgtgtggttagagaattgcagcagtaggggatagggatagggaacagagtggagggtgtcactcaccataaagcttacctacttaacccaaagaggatcaggctgtctgtggtaaaagggagattcagacctcttgaatctctcaatcatctaaaatgttgagtgagtttttgattgtttctaaatttggaagtggcatcagcaaacatgtgaccagtgtgtttcagtctctggctagacagtggggttcagcaatatgccagaaggagaatgtagatgccgtattcatcttcagtgaccgtggtaatttgtatctacagtatatagtgactagagctttcaaagtgcttctacttcattgtccttggaggttttcctcccgagatacgtacttctcgctacaattattaaattgtctttccagtatggatcctaaagttgggggtgagataagttggcttccatcatttccttctctgtaacaagaacactttagtgaatagaatgctcaaagtccctaactccttcctatttgatgttccagatctgcagagttgagggacctcgttgagggcttggccacctttcccaaccattcctccctctactccaacaaccttcttgctgatgagagactctcccctggtgcccctgtggggacagaagcccctaactcagcttttaaaatatttgcttcagcaggacagtccccagatttccccacctacaagagcagttaatcgctctgcaccacttccatccactgcattcttgctaatattagcagggggagtacacgtcacaagatgaggaagggagagtcagagagaaactctctcttcccccgtcaaatatacatacacacacaccacacgcacaagctcgtgtgcacacacacacgcccatgcacacacgcagacatacacgcacacacgcacgtcagaaggtacacagtagggttattttggagtctctgcaatgctcagcaccccaggcactgtgcctgtcttggcagttctataccactttgccatttactaaacccactttatttatccatttgtttgtttattcattcaacaaatatttacagagcatctaaattatgtcaggtactagaagtccagtggtcaatatactgtccctgtcctgaaggaatttctagcccattctataaactgtcacccccaaccttctctcagcctaagagtctaaatatgtattaggatatgaggtcattttctgaaaatctgaaacagatgccaaaacaaagatcccttattattgtttctattacaatgtggaagacaagagcatttcatggtacttattcttcctgggagacattggaaattcacatttcacaagtcaaatggtaaaacaatactctaatatatgaagttttatacctacttttcaagtttttggtgatcttggctcattttttaattttattttttaaagtgacataatattaaactctcctagtgagtgttaaaaatctgggagttttagaaggagaaaatgtaaatcattaagaacacttaaaaaaatagaggcaaccattattatcactatttgaaagggagaaattgaggctcagagaagtaaaataagttctttaagtttaccccttaggaagaggcacagcaggacttacccgtgcactaacacccaagtgctgcttccccataaaatggtgaagcatttctgctcctaacacgacccccactaggcaatggagtctagtcactctggtctgttcccgcaaggactttgctcctgcaatgacccctttttcttttacatttttgttttttttttcattagcatagaaatattttataatataatattaaaacaaacaaaactgtcttgtcctgaagtccacttccagctgctgcctatttctccattcccctttagttcacagaaaaacttctgaacctgttgttgtctgtatttactgtctccactgcctcacctcccactttcttgaaaccactcttacggagctgctgtatttattccactactagggctcaccatgctgccaagtccagtgatcagttcttagtcctcatatgaagtgatggctcagcagtgcttgacaccgatgatcacgccctcctccctatagctctctcatcccacagctcctcatttcctctgcaggcactgactgcccttctgaggcccctgtattggctcctcctctttctacctctgaatgctggggtcccccacattccctgggctcagtcttcagcctcttttttcctctgtctatgctcactttcgaagcaaatggttttcagtcctaacagatacactgccccctttctataacagtatcttctatcactctccctactctctcgtcataacatatcacagggaatctgcagacacatttataatttaacgctgcagctatttcattttagagaagtaaaattaggtgtaatttgaaaatatataattatgctattttcttatatctcttagtaccacactgcacaaaaaataaatacttctatcagcacttggcaaagtttaaaaaaaagaaaaatgaatcaataaataaataataccacaacatttagtattacatttaatttgacttagtatataatcccaaaattattacaggagtcagcaggtgttaaaatcacattcactttttctcttcattactacttgctgtgagaccttgagaattatactaagtctcagtttcaccctcaaagatttgtggattctcaaagaagcaagtgaaacgcatagctaatattttatacttgcttgtgcgaagtaaacactgttcctagcacatcatatgtttcactttgttcctcaccacaaccttatcagccagtcactataatataatattccattttgttaatgggaaaactgaggctcagaattagaaattgccgaatgtcccacaaaaagtggtgcagccaggattagagtctgtctccagagtctgcattgttactgattactcggtgacacagaatatttggtaaatgctctcaaagcttagctattattattaaaaggtatttctatatttcttcttcccatcttaacaaataacaagtttttgaaaatgtgaaatccagatgtgaatttgaatgactgataatttaatttattttcagtcaattgttacgtatgttttctttttcttcccaggacatggtgacccaggcatctctgtatctgcttgaagctacaggaaagcgattttatttcaaaaatgttgccattttgattcctgaaacatggaagacaaaggctgactatgtgagaccaaaacttgagacctacaaaaatgtgagaatatcaagttcttctttaaaattccactttctcctgtaaccaagattttttaaaatcaaaatattctagaatcaaatgtgattgtttgaaacttactccagtacgaatatggttaattcatttgctgaaactttgtgatgatagaaactttttcttaaatttcaggctgatgttctggttgctgagtctactcctccaggtaatgatgaaccctacactgagcagatgggcaactgtggagagaagggtgaaaggatccacctcactcctgatttcattgcaggaaaaaagttagctgaatatggaccacaaggtatgaaatattctaccatacttctcatacaatttaactattttatgttcaaagtgtatcaacactagcattatctttgtgagtaagcatgtataagccaaacaattagagataaaacatcatagcatttttcacttaaaatagaacatgcatttcacttagaatttccagcatttctcagctatgaatttaatttactttagatacatgtataaatacggtattttgaattctcgtaaattattattatagcatcatactataactgtaaaagaatttaatttgtattaagtttctatggatatgtaaggagacaacggaattaaatcttctacctgcaattcatacaatagccaccagatggcgtatatgtgcagtgctctcagacgtgcattcaaattatatatgaatcttgttaaaatgtggattctcctttaggaggccgaggcgggcggatcacgaggtcaggagatcaagaccatcctggctaacacagtgaaaccccgtctctactaaaaatacaaaaaattagccgggcgtggtggcggacgcctgtagtcccagctatttgggaggctgaggcaggagaatggcgtgaacccgggaggcggaggttgtagtgagccaagatcgcgccactgcactccagcctgggcgacagagcgagactccgtatcaaaaaaaaaaaaaggggggggattctcattcattaggtgtgggatgggactcaagaatctgcatttttaacaagctcacaggagatgttgattctaccggtctgtggatcacactttgagtagcagacagaatacctttgcaattcatctctcaaaaacatgtaactaaagaaaaaactccaatgataaataaactttatcatttgtatatgaggtacatataacaattattggaggaaatattaaacaagtaatgacatatatataaaatgtactttccaagaatcaaatgtgactctttactaaataactagcattagatttctttacctcaaaaaagatttggatcccctagaaccagcttgattttttttaacatataaggcacagaaaacaagcaaacaaaagaacgctatccaagccccatccccaaacacactagagcgcttaaagacctggtcaaaaggatgtgtcaagcgtacctctttgttgttctacaacacatttcacctccataacaggaacagaacattctcaatgtatgactcaacaaataagtgttgaattgattgacctgactgcctcatcccactcctgagcccactccagccatcatgatcatatataaaaccattccttaatagtgtttcctttctgtattgtgactccactccaactctctcacaatcatctttaaagagaccaccaatacctacagaataaagtcccaatccttagtgtgggatactgagtttccacagaatgccccacctcacataaccctccaaattcagccttccttggaatttacattccagaaaaactgagctgtacataagtcattcactcaagtttaacaaatatcactgaatgcctgctaagttctagacactatgtgcccagatatgacagtgaagaagtcatattgtctgtcctcatggagacaattttctattgtgggagactggcaagtaagtagcaatgactgtttatcattgtaagtgcctaatgggagatggtgaaatgcaaacgcggagtactgggcctaagatgaggatttcagggcaggcttctaggcacatagaagcttgattttcaaagaagaataagagttatccagacaaagatgggaaggaagtattccaagctaaggaaacataggtaaaaaaagaccagagttgaacaagagcatgatatgacctaggaaaaaaaggagttcaggaattcatcctaattctagagtttgggaagggagtggagaacagcaagaaataaggctgcagagaagagcaggcctgaggcatcagggaccttgtacaccatgttgagaagttggacttaccctgaaggatggagacatggaggccaatctggtgactattgcagcaattcaggagtaagtggcaatgggcctggaaaggtgagaatgaataaaaaagacagagatggagtaagcagaccttgaggtctgatgggataggagccatgagggaggagaattggttgaggatgctgccctggctgctgtaggaatgcctgggctcccatagccgcctttgctgacctctgtcatcatacctgtaccaccaggcattttagcttctaatcacacatgccctccactacaccaggagctatgtgaggatagggcagctgtttgtgtctgaataacggcttggcacttactaggtgcctgattaacatttgataagccaaaataagtatttatattttaagaaaacgtacagttatattagatctaaagaaatcaagtctttaatttaaaaaattaacacagcaaagcataaatattccaaacattgctttcttccagtgtgagaaggtaattttgccattcttattgtaatcagttttttaaaatactttctcacaggtagggcatttgtccatgagtgggctcatctacgatggggagtatttgacgagtacaataatgatgagaaattctacttatccaatggaagaatacaagcagtaaggtatgtatattttgatttaacttgttccaaactattttaaattgcaacctttttttcttgaattgattactttaaaaaatgtgtgtcctggcttattttctaattcaaattcattcttagtgccttctttttcagatttccacaaaactaccattttgtttactttacaagtgcttcagttaattgaattattcactctgcagctagaagtcatttgcctccttttttctttttttttaactgtaccaactataaaaaatctacagttgctgtgtttagtgtctccatcatcccataccagcatcagtgacgtaagcagagctaatgaggctcttcggtgccttcagggcagaataataatatcttctttttttgagaaagggtcttactctgtcacccaggctggagcgcagtgatgcaatcacagctcactccagcctcagcctcccgggctcaagcaatcctcccacctcagccccctgagtagccgggactacaggcacacattaccacatcagactaatttttatattttctgtagagatggagtctcaccatgttgccaggctgatcttaagttttcgtacaggcagggtgtccttatgttgcccaggctagtgttgaactcctggactcaagagatcctcccacttcgacctgccaaagtgctgggactacctctgacatcatggtggcgtgagccaccatgcccggcccagaatggtatctgtgtggactctgtcagtatgaatgggcttgggagggactgtgaaacttatctgaaaaacaatccaaatatcaaagcaaaacagaaactcctcccagtttgaattaaaccttgcgcgatgtcagtagaaatcaagtacaacacttggaaagaacgcttggctgccatgaatttatgggctaattcttgcagccagcagtctcagtgcacaaaaactgctttagtgcaaacagaagtgatagggaacttcctaatttattttaaagagttagtacaactcagatactaaaacctgacaaatggaatgaaaaaattctgtagctacaggctctctaaaaagatagaggcaaagatttcaaataaaaggatagtaaattacatctggcaaaattaagggaaaaacaaacatattaaagccaagtaagaatgtcttccagaaatccaaaaatgttgtaatagtaagtaatgaatatagtatatgaagaaaagaagaaaataaatgattgttccaatagattctcaaaagaaacttgataaaaacgcacacttattcctgcatttaaaaacaacaccatctttttaagtagaagttggtacaacaccctctccatgtctgcttccggtcttgcttgcctgatggccctttaaggagatgcactcggctttgattcctaactgtcttgacctagtacaattttttcaaaaggggctcagaacacagatttggcttccatttctcgcacaggaccattactgctctttacttttctctttctttataacagtcagactctgtacacttggcccatttccattatattatgcctcattgttggatctcttcaggcataaagagacatcaagtgggccgggcatggtggctcacatctgtaatcccagtactttgggaggccgaggcaggatcacctgaggtcaggagttcaagaccagcctggccaacatggaaaactccgtctctactaaaaatacaaaaaaattggccatgtgtgatggcacacacctataatcccagctactcaggaggctgaggcaggagaattgcttgaacccgggaggcggaagttgcagtgagccgagatcacaccactgcactccagcctaggcaacagagcaagactccatccccccgaaaaaaaaaagagagagagagagacatcaagtgcactgctgcctcctagagccatgcacagccttcctgatgccttcggcctgtacactctgcactacatggaccacagcacagaggggcttctctgatgcaatcatacgttgctttgacttttcaaacccagtgggcaccattccaaacctgatatctctttcccagttctctttcctaagcttccagccagttagacaccatatattgccttggcagaaagggtgattagtagtatttccttctagagatattctagaaatgagtacatatacaacacatttttctttcgacagataagacatgatcgccatgtcctctttaaaacttttaatttcaatatattaataatatgtattgctcattatcttccaaatttttaaattatttttaaggcttagaagcaatcacacaaataacagcactgcccaggacaggaggttacttcattcatatgatacagaacatctgttcaaagctaacaatctacctcatatttaatagggaaacactagagacactgccaggactaagaatagccactattatcacaattattcaatcttgcttaggaaattgtggccaatgtaataaaactggggatgtaaaaagatggaaaggaagagagaaaatcattgttatgcagatgatctgtgatccacttagaaaacacaaggaaataaattgaaattaaaattgacaagggaagccaataaggtgaccaaatacaaaataaatattcaaattacttttccatatattagcaataaccagttcaaaaatataatagaacaatacttcaagacagcaatgaaaggtatgataaaagtagaaacaatgctaagaaatgtggaagatgtatttaaagaaaactataaaatccttctcaaggggttaaaagaaaaccaaggtaaattgggaaacattcaattcatggaagatataaacgcaaacaaaattcatatatagggtttatgaaacgctaatcaaaagtacatcaatttttacctcattaaaaaaatctaagagttcgttgagtagatagtagctaagatcattttgggaacaagaaagtaataaagggaattcttacttttcaaattttaaatatgctataaaactacattaattaaaacaatgtgagccagggcacagtggctcacgtctgtaatcccagcactttaggaggccgaggcaggcagatcacaaggtcaggagatcgagaccatcctggctaacacagtgaaaccctgtctctactaaaaatacaaaaaattagccaggcgtggtggcgggtgcctgtagtcccagctacttgggaggctgaggcaggagaatggcatgaacccgggaggcggagcttgcagtgagccgagatcatgccactgcactccagcctgggcaacagagtgagactccatctcaaaaaacaaacaaacaaacaaacaaacaatgtgggcagacattacacatatgataatttagttattataggtagaattacaagtctgtgaagaaagataggatttcttgagatagacaattttttaactgtgtggggaaaaaattaacagactcttttccaattggatggactctttaaagataaaaagcagaatgataatgaaaactagaagaatgttaataagtatcaaatccctagataacaaaactctttcaatgcattcaatcattgaaaaatataactaagagaataataaatgtggctacatataaattaaaaattttgttgcacacaaaccaaacataaactaaataaaaaggaaaaaacagaaaaagatatttgcaaaaacaaaaaagaaagcctttagaagcttagtattgtagcacataaagagcttttgaaaaatcagtaaaacagtaacatccaaatagaaaaatagacaaaggagaagaatagataatttacaaaagaagaaattaaaatgcccaggagtttgagaccagcctgggcaacatggtgaaaccccttctctacaaaaaatacaaaaattggcctggcatggtggcacatgcctgtggtcccagctacttgagaggctgaggtggaaggatcacctgagcctgggggtgaggttgaagctgcagtgagccatgatcacaccactgcattctagcctgggcaacaagagtaagaccctgtctcaagaaaaagaaaattaaagaaatgaaataaaaatgtccaataataaaaatgttcatacttactagtaatgagagatgtaaatttgatagggatgagattcatttattgtctagtaagttattgtcagcaggatgaaagctctcacagatggttgttagaggcataaattcatgcaacttttctggaaagcaatttgggtgacacatatcaaattaaaaaaagtcttgatcctgtgatttcatgtttaaaaatgcattgtaaggaaatgatagagcagctgtatcaacgggctttaaaatgttcaaacttttggatatagtaattactcagggaatcaatcacagggcaaacttggaaatacagtcaaaattggatatgaaattttgtttattcattgatgttttattttagtactgacaaattgggaggggaaactaagttcaacaagttagtctgaatacatatgatagtattaaaagatataaaattattaagatcacattttgaatttttttttctttttttttggagacagtcccaattgtgtctcccaggctggagtgcagtggcgcgatctcagctcactgcaacctctgcctctcaggttcaagcaattctcgtgccttagcttcccgagtagctgggattacaggtgcgcaacaccatgcccacctaattttcattgtatttctggtagagttgggtttcgccatgttgcccaggctggtctcaaatttctggcctcaagcaatccacccgcctcagcctcccaaagtgctgggattacaggtgtgagtcaccacacgcagccacattttgaaaaatattaaataataatattaaaaaattaaatatgctaagttttttttaaagcaggaaacaaagctatctgtgcagtgagtgttatgttgatatatacaaagtgaaaaatgcttcaacttggtaacagtagctcatttctgatggtgagacatgtttttttcttttcttcatgctttttgccattttccaaattttctataccggtcatgcatggttatatacttaaaaaatacaattaaacaataaggtgtagggggaaagcattccaactataatagcaacaaaagtcataaatacctaatacatggaaacatttaaaatacctatgaacataccagaactctacaaaaaccatgtgaaataaactaatcagaaaacaaacaaacaagaaatgtcagcaaatcttttgtgggaaataaaagagggctcttgacctgctagggatgaagggaatagattcaaaggtgcctgaggacttagtctgtattaatgctaacaacagccctaagccagacttggcttttctgctgcgtagaaatacattctgataccatttttgcaatcccctcagatactttctggcaaacagaaatgactctgatgacaatttaacacttttgctatgatgggatgtccttgtttcttggatcatgagaggaaaatcacagaaaggcaatctgtcagaaactgagcatagactctgaccctttgaaatgacgacatcacctaaacatctaaccttcctatattttcagatgttcagcaggtattactggtacaaatgtagtaaagaagtgtcagggaggcagctgttacaccaaaagatgcacattcaataaagtaacaggactctatgaaaaaggatgtgagtttgttctccaatcccgccagacggagaaggcttctataatgtttgcacaacatgttgattctgtaagtaccttgttctcaccccctcccccagattcttatgaatttagtgaggcttttactccaagtgctccaagggagaatcaaagtttagagaaatcatcagtgagcagtggattatctctgggacaagctgggtgtgcaagtcaaggataaagtcctgtcttccttccccttaccctcctcgtgtccacgctttcttctccatcatctccctcccactagtttttagttcaagtgcttaggattactttaaatactcacaaaggcatacaagcacacacattcttacttaaataaggacttaacccagggggattaggcagttccttttattagttaataaagacatgatcagtaggctcttgatttaactttcagagagctcttttcagactgcatgtttgcttttggttgttaactgaaattttctatctttttaagagtgttggttacattagggagtttacacatagtttaaatagctttaaatagttttaaaattcttaatttttttaatgaataactggtcataaaatgaacttggccagttattgatattactgctaaatatataaatcagaaattttgcgcaaaatgagattgaaggcatcagttaactgacttcagtgggaagtctctcttgtcttccagtctcatataaaattacattttccttttggaatagagggtgcaataaattgcaagagtctgttcaacaggaatggagcataagtttttaaaatgtgatgcaccatggctcaccaggcccatcgtccttcaatttggcattgcagtccattcccaggcctattcagaaacttccaggaggaggcccagattatatattttaaattagccacagagttaaatatgatgcctagtcaggtgtggaagcctctgcctggggtttacacaaacgtttttcaggtctgcttcctaaaaagtatccatattgataacataaaaacattaccgaaacacatgacctgaaaaacgcacataaagagaaaaatgttgtacaactaatgattactttctaaattaatagcatcccagatattaggatttgtaattgcatgataatattgtaaagtcactgagaggaggaatcatgttacttttcttttgtatactatgccttaaaaaaaaaatcccccacaggcgagagatataaatactagcaagtgttatatgacataagaaaggtaaaggaaccatcatttattggctgtgttagtattgaccttagtgcatatattctcatttatttcctgcataataactatcactattttgtagatttaataattcaggtgcagagaggttaaggttactcaaaaaataacaaagtcatattgagtttttgttatgtgtcaggcactagggctaaattttgaggaagcaaaatttagtaagcaggtttctgtaatagatggtgtattaattcattttcacacctctataaactatatctaagactggataatttataaatgaaagaggtttcattgactcacagttccacatggctagggaggcctcaggaaacttaccatcatggtggaaggcgaaggagaagcaaggcacaccttacgaggtggcaggagagagagaatgcaagggaaattgccgcttacaaaatcatcagattacgtgggaactcactcaatatcacaagaacagcatggaggaaaccatctcgatgatccaatcacctcccaccagatccctccctcgacacgtggggattacaaatcaagatgagatttgggtgggacacagagccaaaccatatcagatggatttacagtccagtaagtgcactgcaatgttaaaggggccttattgaaatttctacaagatatcgtgaagctataaagggtggaatggaaattctcaggaggaagagtagaaaatggagaaacatttcggaagtgactttttggctgaacatgaaggtagagtttacaacgtagaagacagaggaggagcaatagagatgccaaaggctggcaagtttgggaactgacaggctatagtggggtaaattagagacatggaatacacagccagaatgagaatggagaatgaagcaaagctccaagtcatagagtttgccattggtatatgaagagtggattgtaatgtatgaacaattaaagcagaggagtaagaggaaagactctcaggcagctgtgaggtggaacaaacagagaggaaacaagatggaaaagtcacaaagtaaactgcaatcgtctgagggagggactgtgatggcttgggtgatggatatttcattggagatggagaaaagatgaagaaattgagatatagtgaagtgcactggtcttgggtactttttaggagggaaaaggtaggaaaacttccagtttcctaattttggtgatggggtgcatagtggtgacatcaagttaggaaatacctgaggaggaggagcagatgggagaaaagtgataaggtcaataatgaacatgtggagtttgaggcgcatgtgagacatccaagtggattttggagagagctggaacattgggagttgaaggttagaatatagtgtgttggtaaatgagtgagaagtaaggaagtggagtttggtggtataagggtggagagataagatggttccaagagaggaatgctggagagggtgctatggagagagcagtgatggcttgaaatggtaaatttgaggagtaggaaggaaaccaaaaagaggaggtaaatggattgctgaggagcactaagggtccaatgagattgaaggcctggtttaaggtaggaaatctgcattattactgtgattttccccagcactgttccacagtgattgtgcaattgagccaaggttatgcattagcagagcagacaggtctaacaaattattaaatattctaccacatagtttaccattatctatataatttcattgacaatttcagatagttgaattctgtacagaacaaaaccacaacaaagaagctccaaacaagcaaaatcaaaaatgcaatctccgaagcacatgggaagtgatccgtgattctgaggactttaagaaaaccactcctatgacaacacagccaccaaatcccaccttctcattgctgcagattggacaaagaattgtgtgtttagtccttgacaaatctggaagcatggcggtatgttcaatgagtcttggtcttctggatgctggtcacagatatgcatgttctggaccctgactcggaactagttgcgaataaacataacccgagggccagaatagttataactgtaacattgtcttcagaaatgcccacttcaactttgttcaacaaaggttcagcatcaactatctcatttgccaaattgaattaattttcaatttatgaaccaagatctgatgaattatatgagcttaacatttttaatgtttcactgacaatatataagtctataggtccatagtcttatatattagtctgttctcatactgctataaagaaatacccaagactgagtaatttataaaggaaagaggtttaatcaactcacagttccacacggctggggaggcctcaggaaatttacaatcatggtggaaggggaggcaggcatgtcttacatggcagcaggagagagagagagagagagagagagtgcgcaatgtgggaagagccccttagccccttataaaaccatcagatctcgtcagaactcactcactgtaacgagaacatcctggaagaaaccacctccatgttcctcccacctcccaccaggtccctccctcgacatgtggggattatggggattacaatttgagatgagatttggttgaggacacagagccaaaccgtatcacctgatacagaacttacctagaattattactaatgcattgaactttaatgattatgtaatctgtttttatcttttactatttatactctggccctaaaattctacccaaaggtgctgctaaatataaataagaaatttttccccataggatatgcctcaagtaagcttatggtcatttgctctacattaaggcagccacttccaaattccctatggccttttctgttattagtctttccatctaaacgtaacctgtttttcttttgcttctccatttagactggtaaccgcctcaatcgactgaatcaagcaggccagcttttcctgctgcagacagttgagctggggtcctgggttgggatggtgacatttgacagtgctgcccatgtacaaaatgaactcatacagataaacagtggcagtgacagggacacactcgccaaaagattacctgcagcagcttcaggagggacgtccatctgcagcgggcttcgatcggcatttactgtgagatgtgtttttctattgtagtttggaatgtttgcaatttatgttgcttaacaaacttccatttccagtgtttccatacatgcctagggtccaactggatgagataaccaaggagcaatattccatatttacttggagactgtttagccacatgaaacagaataggaggttgaaaggggctggcaggcataaggtctcagaaccttgcagtgtcttaggcaggtttgccctaagcctgctatttgggcacatcacactcaatagtgctgttccagtttcccatgtggcagcaggaatatgtagtttccagctcacatggcctgatgtggacaatgggcttgaccatttcctcaagtgctttctgtctctctgaccattttggtccactttgaatatcagttccctgaaagtggtttctattgcatacacagtcagctatgaaacacttctccagatgcctgcgtgcatctgtgttttattacccctgtcacccacccaagctttgactaagggagcaaataagggaggaaaacagacaatgaaatcactgatgtgctgtaccaaacccttgctgtgcaagaccctaggggagatgactaatgccagatggcgtggtggtgaagagagaacctctgattctgcatcttccattcagatgagcgagagagagagagtgtgcagtacaccagtggaatttaggatgccccctggggtggagtctgggtgtggggtgggagaagctcatgtggcttcagggtgatgaggcaaaggaccttggatcttatactgtgttcaagatccctgctagtccctgctgcaggccctggtcaggtctgccctgtgctccttgcagtggtgtctgctgtggccatattagtttggcttgttctcttggcttgctcagggcccagtagtcctcctccactgactcagccccaccctggctctccccgttggagcagagccctgagcaccaccctatcctccatccagcctctagccatactgtatactcctcagcctctgtggcaggattatccttctctcacctgccaacacccaactcagctgtcttctgtctcctctttaggatatgtggcaacatttgcctgttttccatgacacacagcagttatggggagtgcgacaagaaaatccaaattgggcctctctggcctgcagcttagtaaggccaaagccgtgatcacagctgacaggcttctgggctctgggctctttgacacagcaacagcaacagtcactgttctgttctcttctagggagtcaaggtagcctcctctaatagctgaaacagtgagtgaggcggaaacctcctctgccctcagctttcccttccaccttcagaggacgccttcttttctgagattctaggcctttggaagatgccttcttatctgagattctaggccacagatgcttaggcttgatttcttgtttcccctaattctgggtctctccttccactccgtttaggggaagagtggactcttgctttctcttcttaaatagatagcattattcttttatctaattttcctcccgtcctaatcttattcaacattggcagaaggagtatcctgtctataccatataaaaaaataaataaataatccaaatataccaggagtagttgagacataggtgtcacagaacaactaggaactgagaattaatggaaatgaaatgttttgctttaatcagaaaggctgttaaaaatattgacaactcatgtgacctaggtaatgaccaatcagaaccaatgccagccagaaatagctggtattgtcagactggtgaatatcatataagttaaagtctgccctgggtctaatatccccccaatataatccccattaaatgagatggtttctgaaggcatcttggaagctctgaaagcctatcaaggagagaccaagtgaaggaaactaggaacaccttctttgctgtttccccagtgctgtccacccctagagttgccctgcatcccacaccgtccctctctgcagcagaccagccaaggggaaagacagcggtcaagttccatgaatgctgctgggttaagattgtatcatttcaagacagacagatatttggtcattcccagacaattttggttattccctctagaatttcttttctcctttcctgtaagcagaattttcataaacactttggccaccctaagtctgataactcgtgccctaaattctgtccttaggtgattaggaagaaatatccaactgatggatctgaaattgtgctgctgacggatggggaagacaacactataagtgggtgctttaacgaggtcaaacaaagtggtgccatcatccacacagtcgctttggggccctctgcagctcaagaactagaggagctgtccaaaatgacaggtgagggatgatttgctgagacccccggtattgtctctcctactggactgtgagctccagtgaactggggagtgggggaaagatgggatggagagagataggataacctaattggctaactagccacccttacccctgaatgactgtttaagtggactctgcccatttattttaaagctttgtgtctaggactaaggcagcctggagaagatggaactagcacagcactctagtgaggactcaggaccttcttcccgggccaggaaccactcctttccagtggcagctggccaagagacctaggggagacagatgacaagccactaactacataacaccatggcataagtgctatattagcaacagaaagtacaataaagcacaaataagggaggctttaactttacctggagaaaaagcattcaagaaacaggagaagtagcagggaagagcaaagggcatgttaaacaaggcaaaagatcactcccaaaatggaatacaatgcagttcctccataaaaccttcacgtattgtgtgtctaactcccatacacagacagatggttaaaatagattccatgtgtcaccagcttctttagcagagtaggtgaacacatatttttcttttttaacttagggataatattgtggatctcaattattatactgagttgccttctgaggccactaaaatgccagagctgtttattcctaatactacctgtcctaggctgggtttcttagaagcagagcctgagacagggatttgggtccatgcaatttataggagagagagctcttaggagaaaaggaaggaggaaaggatagggccagggaaggagctaagcactgatgcagacctagtcggagtctagctgtgcccacaggggactctggaatggaaagtacatcacagacttgtctcaccttgagacaggagggtggccttttgcaccattgtgtctatcagtctttggctgtggactgtcagaacagggcagaggagaggggcatgttatttctctaggtagggtggccccttttggtaagataattccctggaagaggaggcagctataagccaatgcctagagcagctgggaagagatgcacttggctgggtaaggggatgtgcgtggggcatcaacagccttactgaaattatttccttaagttcagatggaattataatagttaaaaagtgctttcacatcaactaacttagtgacacctattctaaatagcccaggactgcctggcctggtgtaaaatcctgtttttataatatactattctgtaagtgtccctttgtccactgttttttcttgctgctgtcacatatgtgcctttcctcatttagaagaaaactctaaagccacgtttgttggaattatgtttcaaataagagtaaatcgatagtcctggagtacggcttaatgacttctctcatgtaaaagtgcaggacctttaatatgtagattttatgacatcaatttatatcataaattaatatcaaatcatatcagagattcatggctgctttgcagatagttgaagtagccaggtgactgagatgttgctgaagctattatttactaagatttaaaaattagtggctgggtgtggtggctcactcctgtaatcccagaattttaggaggccaaggcaggtggattgattgagcccaggagttcaagaccagcctgagtaacatggcaaaacccatctctaaaaaaaaaaaaaaaaaaaaaaatacaaaaattagacatgttggcatatgcttgtaatcccagctacttgggagctgaggtaggaagatcgcttgagcctggaaggtggaggttgcagtgagccaggatcatgccactgtactccaccctgggcaacagagtgagagcctgtcttagaaaaaataaataggttaaaaaaatactatcaaattctgagttaatgtaggcacctatttgatgttgatctatttatactttaataacacaaagggatatttatattgtatgctctctaaacaacagctaaaatgttgcaaatagttgctttctggaaaataatttctgaaaatgtaattgcattttaggaggtttacagacatatgcttcagatcaagttcagaacaatggcctcattgatgcttttggggccctttcatcaggaaatggagctgtctctcagcgctccatccaggttggagttcttaatctttggtttttcatatttacacataatcatagccaagatggagaatttaatggctaaaagttttaagttttccactcttctggtactgaattaaaatgaaaatagaaggtccagcttgatattaaacattattcctaaaatgcaacactactcatttaaacaaggcaattagtgtctacttgtttggaagcaataccaagtgaattcctcacagaagtcagcagataaaatgtcatatgtccaagaattcttttttaacatctctgaacaagcaactagagcaatataattggctcagaattttcttcagagtagatcatctcaattacaaattttctgggacaagtgtccagggattacttgctttatttttccattacatcaaatttctgttgtttgccaagatttacatataatggacagaaagtgctttgtactgtaaaaagccagtggtgtgagtccagacccctggatcttggtcctcggtctgccattaactatgtgacctaggcaaagaacttcacctctgtggaccttcatttctccaccaggtagagacagaaaacttccaatggcccatctggtctaaaatttcaagaaaaccaaattgccttttaaaagtcttgaaactattaagaaaaaagaaaaatgtattttttcaatgctcttttttagtaattgcagaaattattcacattaatttttaaactagagagagtgaacaatcagcattcacactggtgtgaattataatttttatgatgaaagttcagataaagataaaggaaaactgtaatgtcaaagcctaataatgagagattttgaaaccataggctttctggcttaccaatggagcatttattcaatctaggaagacagcaattatacccatctgggttattctggttcagatttagaaaattaaatgcaagggcctgctttggaaaagggaggaatgtctcctagaaaagtaattaaagtgataaaaggacaagttcacatttaggaaatttctgcctatgatttttgtatttaagaaacctaacagagagagagagagagatggagaaatgagcaagactcattcaccagtgtgccacaagaaccagatctaatagcccttcgctttctccacttgccagcttgtgatctacctgtgaaactaggaaatctggctctatgaccagcccactctgtcttctaataggtgctaactctgagacaataactacctaggagataatcctcaaaatcacattttctaaaaaagccttgttaatccttccttacctcactcccactctgcagctccctcattctattccaaacaagctggccttggcttatgtcatttatctccacagggcctgcaatactacctgacttagcaattaggtaattcagacaatccatgcgtgggtaaaaaataagtcacagtgagtccccttaagggttcatagtctaataaataagatgagcttcatataccaataaatatagggcgaagcacaatatgatgaatgtcgaaggattgatagaaataaaatcctataggagatcagaggaaggggagattttttacaactggtaaatgagatggacagcagagaaaccttcatggagaaagtaatatttgaattttgaaggatgggtaaggcttagacaaacagagaagactaagaaggcttagataaatggagaagacaaatgtaaagccttctaggaaaactaaagagtacgataataaagtcaaagagtcagggattcacaaggacctttggggagtggtcttgtttgggtggaggatggaaaattgtggaagctaaggctagaaaggtaacttagaactgcatcataattgctcctaacaccaaatcaaggattcaggcatcactgaagtctttttaatggcgcactggggagacaggggcagaagggaaaagatcatgtgatgggagctgtattctccagaaagtaagagctgtttttcttaacagcttgagagtaagggattaaccctccagaacagccagtggatgaatggcacagtgatcgtggacagcaccgtgggaaaggacactttgtttcttatcacctggacaatgcagcctccccaaatccttctctgggatcccagtggacagaagcaaggtggctttgtagtggacaaaaacaccaaaatggcctacctccaaatcccaggcattgctaaggtatggagtcagctttttttctttctcataattcaacaagataaaataaagtttttacagaataattgtagcattttaaatgttggtggttgctaaaaggagagtcagtattgaatcaaagagagaacgaggaaaaaaaatctccatccaatgaaaatcactcagtatgtcagcaagtaaagacaaaggaaataggtgatattttgtccaggtactaaatggagaacctttaaattacatagtaatcaagatgcaaaatgatcctcgacattttgggatcataaaagttatttcctttatctcagagactcatctcttataaaaccaaggcaacaataagcatatagctttcagacctcaccatccccctcccacccgccgtggaattttcttgacaatgggaatgatatagttagttcaaacacactgaagctccccgtggctgacagagtatcaaacatgcacacctcttcttagatatgcttccaacatgcttatatcagagggttttcccgtacgtgacattgaagtcaggtctgtgtcacctgaagttattcattggaaatgtttacatgtgttttggtcaggttggcacttggaaatacagtctgcaagcaagctcacaaaccttgaccctgactgtcacgtcccgtgcgtccaatgctaccctgcctccaattacagtgacttccaaaacgaacaaggacaccagcaaattccccagccctctggtagtttatgcaaatattcgccaaggagcctccccaattctcagggccagtgtcacagccctgattgaatcagtgaatggaaaaacagttaccttggaactactggataatggagcaggtaatcacccaagaaattggaagatatttatttctttttccaagaagcaaccagggaatgccaagagggcatggtctggtgagggcagttagacaggcaaggcagcacagcactgaggtctggttgggagagttctccatttccccacaattcctacatttcaaaatgctggaaaacatgagggcttctgcaaggcccaaaacacattaacagctcaagctcaatagattcagtctctggggagttgccatagggtattccacaacccccaaaaaaggaaaagaggaaaattaataaccatattgtgttaggtgctttgtatatacacatacatacatacacacatatgagtgtgtgtgtgtatacacaaatacatatatacaaagatgtatataacctttgtttttataatatcttcactgaggctttcacatttagaaagcagcagagatagattcaagcacagtcctatatgattcctgtatctatgcagactctatattagcttgccccaaaagtgaaaattctgcccattattcttgtctttaagaagtctatcagggagagagagaaagagaattctacagtttaaaaaaaaaaaaaaaacatgtctgcttactgtgaagcaagtaaccttaatagaatgaatcctgtgaatgaatttcccacctaaatctaccctggggagaagtgatgaattttattaaataatcatacaacatttttttcttccacatttgcatatagcagtttaatttagttcaacagatacttattgagtagttaccttgtgctacattgggtgtaacacagaaacgataccatcttagatttcaaaaagaaagtcaacaattcaagaagacagaatgtatacataaaaccacacacagtgataaaagaagtaagccttaccctcaacacaccaaaatcttaaggtctcttggagctaatgctgaatttcttgttgctttgaaaattcatagcctacatatgagttggaaatatacaaataccctccccgttacctatttattaattccttcattctttatcaaggtgctgatgctactaaggatgacggtgtctactcaaggtatttcacaacttatgacacgaatggtagatacagtgtaaaagtgcgggctctgggaggagttaacgcagccagacggagagtgataccccagcagagtggagcactgtacatacctggctggattgagaatggtaagtaatttgtaataacatacctggcttgtgcaaaagcattggtttcaagaggaaactattaagcctgtggggcagaatggtgcatgattaaatcagggtttctcaaccttggcattattaagattttgagccagacaatcctttgttgtggagggctatcctgcacattgtggcatgtttagcagcatccttaacctctatccattatttgtcaatagcaattccctagtcatgacaatcaaaaatgtctccatatgtggtccactaacccttaggggggcaaactagcctccagctgaaaatcactggatagaacatagcttttgactgccttacttcaaagcccagccctctatcaaatacagtattttgtgtaatctttttgtacttcactctcctctgttgtaaaataaggataataatggcagctacctcataggatggtcacacagaataaataactaaacacatctaacaaactgttactggtaaatagtgtttaataaaggttttatcattattttaaaaacacttctaatgaagttctttccattgaagcatttctaatttatcctaatgaatctgttccacagaataaaaaagtaataatttagggtttgttatctacatcaatatcattatccaagtccactgtctgtctttcctcttttctcctcctgctcaggccagggagcatagtagatgaatttcatgtgggccagcacactgagcccacgtgtaagcaggtgggaaaattatgtccatgaaacagacagtcccataccacttttggttacaaacacttgccctggactagagaaggaattgagaccaagtttgtgtcccaatgggttccaggactagttttccatcaatctccaccctgtcctgggcaggctttctcctgaggttggtgtgcgggaaggagaagagctcctttgagaaccttcccactgtcatctttacttgggtgtgtgcttagtgaagagaggattcagagacacatggtgtcactcatgcaaaggtgataatagagggaaatgttttaaaagataccactgcattttttttttagacagtcttgctctgtcaccagtctggagtgcagtggcacaatctcagctcactgcaacctccacctcccgggtccaagtgattcccctgcctcagcctcccgagtagctgggactacaggcacgtgccaccatgcccagctaagttttgtatttttagtagagacagggtttcaccatgttggccaggatggtctcgatctcttgaccttgtgatctgcccgcctcggcctcccaaagtgctgggattacaggcgtaagccaccgtgcccagcccatgccactgctttttgagttaggggaaggaggcagaaggggactggtttagtggctaggtctagccttatggcagcattttacttacagtaatatatttcattcttgtaagtatccctttttaaagatggggaaacagaagctagagagcttatgggttcatataactaatagtgttagtgcctggcataacagtagaaggccatgttcttccctctatccctcgataagccttaatggcagtctctactggtgctttcaacatgaaccctgaacctgctagagcattcacttcatctttgccaagaccagattaatgggtatgaagattaaacggtctttaacagataaaaattctataaagaggtagagtttatgagaaaacaaattctaagtaatgccatgttaggatcttatgagatatttttattgaaaagaaaagagaacctgagaactctacagattgaacagaccagggtattttttaaattccaggattacttttatacatgtcttcaacaagaatgtgaatgaaattgggatcactacaagaactagattcccatgcattcactgagaaaatgagaagtctttcaaaagcacaaaattttggaaccctaacataaaacattttattaaaaactgaaatttaataagaaaaatgaaatacaaacatcgagaaagtgaaagaaatatgcataaacaatcaaggcattcttgaaggtccagttgattagttgccaaataaataggaaagataatgaaactcacactattatttaggaggaatacatttcttgaggcagtctgaggtttaaaacacttagtctttaggcccggcacagtggctcactcctgtaatcccagcactttgggaggctgaggcaggtggatcacctgaggttaggagttcgagaccaggctggccaacatggtgaaaccccatgtctactaaaaatacaaaaattagctcggtgtggtggcacatgcctgtaatcccagctactcaggaggctgaggcaggagaatcacctgaacccaggaggcagaggttgtagtgagccaagattgcgccacaccagcctggatgacaagagcgaaactccatctcaaaaacaaaaacaaagaaaggaaggaaggaaggaaggaaggaaggaaggatggaaggaaggaaggaaggaaaaaacagatgtagtatttaaactgaccttgtggaaagacaagatcaggatgggcaaaaagatgggaaaataagcaattttaggacaaatgtcatgaaaataaattccaaaaggttattccactaaatatccaggaaatatctaagagataaaaaaaagaaactgtgattctctgttttctcttttccctctgatgaaaccgtatttgtggtcttgtctccaaatatttaaaattaattctgtgtgtggaaggaaagaagcagaagtggggaacaggaagagggtgatctgataagaaaacagacggaggtgtcaccatttagtgatgttgcttaccatattttgagtatttttttaatgcagatgaaatacaatggaatccaccaagacctgaaattaataaggatgatgttcaacacaagcaagtgtgtttcagcagaacatcctcgggaggctcatttgtggcttctgatgtcccaaatgctcccatacctgatctcttcccacctggccaaatcaccgacctgaaggcggaaattcacgggggcagtctcattaatctgacttggacagctcctggggatgattatgaccatggaacaggtaagctgaacctggtgtggaccctgtaaaagagtttaccagccaagtagaagagcagaagcgggtgaggcaggcagccgtgttctgatacttagggggcagaaggcaggagggatcttgccggtcctttgaaatgagggataaatgtatttaaagaagagagatttaaaacctgaaaaactggtaaactttgggagtaagaggcttcagccaggaagggtaaacctcactttgtttctgaaatcttaccaaactgtcctttgacaaactccattttctgggtagcagtgactcctggggaagaactggaaatggagcatagatgtctgcagagcagagctcttttggaaggaacctcaggtcctaccagactttctctctcaaagtgtggtctgtggactgcagcatgtagataccatgaacacttgttagaaagtgttttcagatctgcattttcagatccctgggtgatttgtacacacattacagtttgagaagcattggtgcaaactgcctctataaataataaaacaataaacagttgttaaacagtctcttctttctgccgggcactatggctagaaatgctgaccaaggctttacgtcatgcccaatccagttttacgcttatcactgtgtcattatatacaaacaagaatgtaaaagagatagtaatccttgtaaacaggaccatcagttcatttatttgggaaccttatggggtgatgatataatttctcatagacttttaaagctttttaaatattttttaaagctctactgcttaagaagtttctttaatatttcagaattaaagtcacattcttcttttttctttttagctcacaagtatatcattcgaataagtacaagtattcttgatctcagagacaagttcaatgaatctcttcaagtgaatactactgctctcatcccaaaggaagccaactctgaggaagtctttttgtttaaaccagaaaacattacttttgaaaatggcacagatcttttcattgctattcaggctgttgataaggtcgatctgaaatcagaaatatccaacattgcacgagtatctttgtttattcctccacagactccgccagagacacctagtcctgatgaaacgtctgctccttgtcctaatattcatatcaacagcaccattcctggcattcacattttaaaaattatgtggaagtggataggagaactgcagctgtcaatagcctagggctgaatttttgtcagataaataaaataaatcattcatccttttttttgattataaaattttctaaaatgtattttagacttcctgtagggggcgatatactaaatgtatatagtacatttatactaaatgtattcctgtagggggcgatatactaaatgtattttagacttcctgtagggggcgataaaataaaatgctaaacaactgggtatacatgcataaaaactatccattcaaaccc

SEQ ID NO: 761 - DNA, 21695 bp, Homo sapiens
ggttctgcgggttggcgctgagtttggaagtcgcgcgggaccccttttatagcagcgtgggcgacgtgccacacgggtgtcccagcccaggggctggtctgagctggaagaggttgtgcaaataagggccccacctccacggcaggagggtgagccctaggtccagatgctcacactggcgcaggtctgtcctgagccgacacctgcacagtggcgagaccaaggacccagagagaaaggtgagagtgcagccggggaggctgaggatcggcggagctggaagagtgagggtgaaggcaagaagtagagcacagaagcaaagattttaagaggaaagaagacatctgaacccaacaccaccctaaaccacaggttagaccagagtttgggatctgaccctagccctcgcccatcatgcacaggcgttcattgcagaaggggagtttattggggaaggggggattcattgtggaagggtgctgcagtccctcactcccaggtcagtaacctttttcccttccctgcctcctggaggagaagcggagcctgacggatcgggggcgggtggaggtgaaacattggagacattgggcacaccctgggaggcttgaccagtcctgccctggactgacatgccccagaagactcctgcccagtgggttcctatggtcgggggttaactctctgatggggtggcggatggggaacagtgtcaatgcctccagagctgccaattgtcctggaaagagtggcgtttggatgaaggtcctcggtgatgcttctaacagctaccttccagaagtggaaacagctggtgctcctcctccagtactagctgtaggaacaagaggggaggcatagaggacgccctaacagtggctttcgcataccacctaccacccccaccctcaccccgcaggctgcagggttggcatgctccgtgcaagaccagaggcactgatgctcctgggagctcttctgactggatccctgggtccatcgggcaagtatcaggctcctctagcggcggggtgttccccaggatccctgggaggtggggcggggagaggtgcggcaagcggctccctgagactggaaggtcatttcgccgtgcagctcagcgggatgggaaacttcccagtgcggcccgacacttgggtccggttaggggcgctccgcgagctggggaaggactggccaaggccttcgttgctcgggaggggtagctgggagcgtagtgctgaggaggcccttctctgtgcccacaggcagtcaggacgcactctcactgccctgggaagtgcagcgctatgacggctggtttaacaacctgaggcaccacgagcgtggtgctgttggtgcgttctgggggcccgggcgtgctggggccgtggctcgcgaagggccggggcgcgaaaggccctgagcggggaatctgcggggaacacgcgcccagcagctccgctgcctacacagcgcaatcttatgcgctcccggggccaagagacccttgagggaaggttctgtcagtgaagtgggatgggggttgagggaggcttagggagaggtttgggggatcctaggggatggagtgcttagacagagccccgctccctgcctccgcaggctgccggttgcagcgccgcgtaccagccaattacgccgacggtgtgtatcaggctctggaggagccgcagctgcccaacccgcgccggctcagcaacgcagccacgcggggcatagccggcctgccgtcgctccacaaccgcaccgtactgggggtcttctttggtgagggcaaagggggagaccagtggggttgatctggcgctctgctcagcctgggggaggggccagatcccgtctgcgagtccacaggagacccatccgactcccaaccacttcctctctacgcagcacttcgagactgccttcatctcggagagattttgggatgttgatacagagatatttgctctgtatctaacctttctcttacgccttattccaacctaggggtgtcactggacccccattatagctcttgggaactgagctccccagccaccgctctcctcaccgtgtgtttgtaaccattttacctccccctagcccagagggaggaggactgacttggggtacccctacataaattatatcattttgattctcacaacagctttatgaattgagtaggaagggaactcactatagtcttactttgcagattagaaaattgaggctacctggggctaacgtgcagagctggtggcggagctggcactgggacctctgtcttttggctcctgaggacacttggaggccgccctggccgtggggagggcgcaatacggacggtttgtcacgtattggcgccccatgcccgcaggctaccatgttctttccgacgtggtgagcgtggaaacgcccggttgccccgccgagttcctcaacatccgcatcccacctggagaccccgtgttcgaccccgaccagcgcggggacgtggtgctgcccttccagaggagccgctgggaccccgagaccggacggagtcccagcaacccccgggacctggtgaggcggggaaggcggcgggaagggaccgcaccccagccaggtggggcctgggcttcgggcctggcagggcctggaggggagaggcgcccactccccagccgcggacacccgccgggccccggccttccctggcccgccgccgcctctcgacccgggctcacccgccgcgtgccccgcaggccaaccaggtgacgggctggctggacggcagcgccatctatggctcctcgcactcctggagcgacgcgctgcggagcttctcggggggacagctggcgtcggggcccgaccccgctttcccccgagactcgcagaaccccctgctcatgtgggcggcgcccgaccccgccaccgggcagaacgggccccgggggctgtacggtgaggccacaggggcgggacggggccggctgggggtctgcgagtgtgggctcccccgatcacgctaccgctcgtctcctcccctgcgcccccacgtcggatgcagccttcggggcagagagagggaaccgggaacccttcctgcaggcgctgggcctgctctggttccgctaccacaacctgtgggcgcagaggctggcccgccagcacccagactgggaggacgaggagctgttccagcacgcacgcaagagggtcatcgccacctaccaggtcagccgtccgcgccccgcgacgtcctcccttccgcgtgcaagcccacgggagactccgctgccccatggagctccccatctgtggacaaccgccacccagaaacccctccccagacagccgaggtctagggaagcccctgtaaatgatagggaggcacgcgctgtttataggagaaatctggctggtgatgattatttatcacctccccaacccccactccctcaaatcccctggttccttgtggggacaggcctcacactgctcctgtctgagttgcttctcccatgattgacccttcctggtctcatctccacacggaagccgtccttgggctcagacccttccaggccccacaccatccaacttgtgcctcccctcgcccctctctgcccctcagaacatcgctgtgtatgagtggctgcccagcttcctgcagaaaacactcccggagtatacaggtgagggagcggggaaggaggacacctgtgcggagaatcctgaggggaaggagacaggtgcctgtgatgggaggatgtggaggcaagaagcctgtctccccatcatcaccgtctccttcctgcaggataccgtcctttcctagaccccagcatctccccggaatttgtggtggcctctgagcagttcttctctaccatggtgccccctggtgtctacatgaggtgagggaggggttggcagagaggggcaccacactaagaaaggtgcagaatgagctgccttgggggctggggcctttcacactccttcgcagtttcactagagaaggggaagcaaaaatttggggccctgaaacagaaccctggggtaagatgtgtaggcttagtagggaaatctctccagctctcctaagggctgaaatttggtggctgggtgtaggatttgtctagcagctgggtcattcccttccctcctctccccaccctacctggactaggagcgcactctatcttcagtaaacgcacatcaccaaatctctgccgtgttcaaggaagttcctgggccactgctcaatcctagtgaacccccactgagtccctcagcccactcaaccccatctttgattcttctccaaattccctcaccacatcctttgttctcaatttcagaaatgccagctgtcatttccggaaggtcctgaacaagggttttcaaagctcccaagctctcagggtctgcaacaactactggattcgggaggtcagactggggtcagggtcaggggaagatgggtcaaggtcagtctcttcacacaggctgggaaaagcaacaatcccagttcttgagtgttgctgccccaggttcatgggagatgaagggtagaggaaattatccggggacaacagttcaagagagtctgggactggccaagggccctttgtcctggggtactaaagtggtccaggctgagagagaccgagttttgggtagaggcctatcttgagtgcattgtttacttccagaaccccaatctgaacagtacccaggaggtgaatgagctgctgctgggaatggcctcccagatttcggagttggaggacaacatagtggttgaagatctgaggggtgagctcagagccagaaggggtggatggtaagggaccaggaagcctgaggatccctctgggttcatcaatagcagacctagggcgctcacgatgcaggaacacagatacaaacacagacttcaaggagccataagaagaaaatgaactttgaactttttttttttttttgcttaatttacacttttgtgttgcttttattttaaattaactatgtctgagtattggggaggggtggtaccacaatctctttggtgcttaattaggtctctaaaggttttcattcagccctgtcttgaaactagggaggcataggacagggaatttactgcttggtgactagaacagtcttgagtcttagaggaagggtcttactggaaaaactggctctgatcacccatggtgacattggccttgcagcaaggcaaggtcagcatgggcacagatctcatgtggatcactgggggtagccaggagggaagaaccgtagtgccaatagtcagatacaaggctgcagggcaaaaaaggatggagaggacaaagcccatagtctagtcttctctcctcttcagattactggcctggccctggcaaattctcccgtacagactatgtggccagcagcatccaacgtggccgagatatggggctgcccagctatagccaggccctgctggcctttgggctggacatcccaaggaactggagtgatctcaaccctaatgtggacccccaggtcaggaatagtaatgataataatggcagctaaagctttcctatggcaatactgttccaaaccctttacatatgttgactcatttaatctacataataatattgtaaggtatgtataatcattttccccattttactgatgacatagttggtaaatcatagaggagggacttaaattcagccatctgattccagaatatattcctaaccactgcattgtaccattcctgcagggtggcttctgggttgggtgccattgtcctgttgctgcagggtcccaccccaagggctgtgtgcccctgaagctgctaatcattgaggtcaggcaggctggtgatggtcacaggatatggtcctagggcacctgaccgtggtgttaccgtgggtagggacacactgatccttccaccagacttgtcctgcctgagggggcttgcctaagaagaggaaatcaggcctgagcagcagccaggcagcggctgaggttctgtgcccgagggatggggcaacagtggctgccctccgcagcaaacatacgctcaccccttatctcctgtggtgccccaggtgctggaggccacagctgccctgtacaaccaggacctatcccagctagagctgctccttggggggctcctggagagccatggggaccctggacccctgttcagtgccattgtcctcgaccagtttgtacggctgcgggatggtgaccgctactggtttgagaacaccaggaatgggtaaggcttgcctgggcccccacctcagactgctcctcagcctgagccccagaccctctgtctagccttagacagcccctatgagcccttgattcccagtcagcccaccacacccttcccaacccctctgggtctctctttttttcttctcttctctttttctttttctttttcttttttttttttttttttttttgaggcagagtctagctttgtcacccaggctggagtgcagtggcgtgatcttggctcaatgcaccctctacctcccaggttcaagtgattctcctgcatcagcctcccaagtagctgggattacaggcatgcaccaacatgcccggctaatttttttaaaaaatatttttagtagagatggggtttcactatgctggtcaggctggtctcgaactcctgacctcaagtgatccactcgccttggcctcccaaagtgttgggattacaggcatgagccactgcacccagcccctctgggtctcttttctcacctgggtccttgggcctggggttgctggaggcctgcatccccttcccatcccagtgacttctacttcctccaacttaggctgttctccaagaaggagattgaagacatccgaaataccaccctgcgggacgtgctggtcgctgttatcaacattgaccccagtgccctgcagcccaatgtctttgtctggcataaaggtgagtgccgtgggagaacacaagtgagtgacagtggccagagaaggatcaagattgagggtgcgggggaatcacttggtgctgtccagggagccaggcaccttctgtgttgggctaggaggcctgcatttggctggctcccacagcagggacctcaactagcacacaagctacaccctacagtcaagaaggggtggatggggtagatgccaagagacaggaaatgaatggggactttttgagggagacagtttcagggaggtgggcctggggaagacagatgataccttggtcctttataggatagaggggaaagaggtctggccacatagcgggatcctcagactttgaggtcttccctgccctctccctcaggtgcaccctgccctcaacctaagcagctcacaactgacggcctgccccagtgtgcacccctgactgtgcttgacttctttgaaggcagcagccctggttttgccatcaccatcattgctctctgctgccttcccttaggtgagctcttaggcagcctctctgcagactggccctgcccctcatttcctgctggcctgaggggctggctatttggtaccgtttgagaccaggctcaaggaacctctggaagggaggggccatagcctaagccacagtggagctctaggtgaggggctccctcctcactgttccttctgatccacttcagtgagtctgcttctctctggagtggtggcctatttccggggccgagaacacaagaagctacaaaagaaactcaaagagagcgtgaagaaggaagcagccaaagatggagtgccaggtgagcaggggctgggcagaggagggaggagggacggaggaggggagagacaggagtctgggagaaagaaccaagttacagagtgagaggaaagccaaggcacctttagggcgcctgctcagactcacagaggaattgacctgaaggcggggacctggggacatctgctgaactacccggcccaattatcccttccccagcgatggagtggccaggccccaaggagaggagcagtcccatcatcatccagctgctgtcagacaggtgtctgcaggtcctgaacaggcatctcactgtgctccgtgtggtccagctgcagcctctgcagcaggtcaacctcatcctgtccaacaaccgaggatgccgcaccctgctgctcaagatccctaaggagtatgacctggtatggctcgtcctgcctccccagcctgggctgccctcacacgactccattatcacaagcgaggccaccctatcctcagctacagagctcaactatgacagctgatgctggggagaggggctcctttcagaggcccccagacacaacctgacccccttcgtccacacacctggccccagcctggatggatggggaggagttttctctcctcccctcaacccaagatccattgaggggaggctgaagcagaaggtccagcgagctccctgcgtcagtgccgccttcctcccacccaggtgctgctgtttagttctgaagaggaacggggcgcctttgtgcagcagctatgggacttctgcgtgcgctgggctctgggcctccatgtggctgagatgagcgagaaggagctatttaggaaggctgtgacaaagcagcagcgggaacgcatcctggagatcttcttcagacacctttttgctcaggtgccatgacctgtgccttttggagatgggtccagccccagaaatggaggaaacctgggctgcatagaacgcccctgtgggtgaactaagcttccgctctatggcctggagagaaatagccttgtttgaatcctggcattgccactttacttagctctgtgaccttaggcaagtcacattatcactgttctgtatctctgtttcctcatctataaaacagtgatgaaaactgtatccatcccattgcattgttgtgaggattcggtgagatcgtctacatgagtggtacacagaggttggcctctggacccgagagcatcagcctcacctgggaacatgttagaaatgcacctacccagttagactgaaccaggaactctgtgggtggggcctggcaatctgtgttttaacaagctccccagatgattcagatacactctaatgtttgaaaaacattgttttatgtacagtgcttattggcccaagtgccaggtatgttgcaggcatttaacaaacggttgtggccaggcgcagtggctcatgcctataatcccagcactttgggaggctgaggcgggcagatcacctaaggtcaggagttcgagactagcatggccaacatggtgaaaccccatctctactaaaaatacaaaaattagctggacgtggtggctcacacctgtaatcccagctacttgggaggctgaggcaggagaatcgcttgaacccgggtggcggaggttgcagtgagccaagatcatgccactgcactccagcctgggtgacagagcaagactccatctcaaaaaaacaaacaaaaaacaataaatggttgttacatgcgacttttaaactttttgtgcaatgggcaaatcataggcacatggcagccttatctgaattggcaagagagcacagccccagccccttcctgcctgtctaccaccatgtctctacatcttctgtccccagtataggctctctcactttccattccccttaacttcgcccttccccttccctaccccagcaccatgcccactgcatgaagttcccggttcttgggcccagggagaaatgggcaggctgctagagatttgattcccccgtctataggacaacagaggccccagtcagtatatctaaggatcaggagaaccatcagagtttagcctttctgatttggactttggggagatatgaagggtcactgaactgcttccagcataggcttcacctccttctctttccctccctctgctgctgcccgagtgcaggtgctggacatcaaccaggccgacgcagggaccctgcccctggactcctcccagaaggtgcgggaggccctgacctgcgagctgagcagggccgagtttgccgagtccctgggcctcaagccccaggacatgtttgtggagtccatgttctctctggctgacaaggatggcaatggctacctgtccttccgagagttcctggacatcctggtggtcttcatgaaaggtagggggctgggaggtggcaggctatccaagaatccaggggtctttcagcaaggagatgacctgcattcccttttttcttcccaggctccccagaggataagtcccgtctaatgtttaccatgtatgacctggatgagaatggcttcctctccaaggacgaattcttcaccatgatgcggtatggggtgtgcctttctaatcctgagacttcctggtgtgtttcaaacaggaaaacaggtccagtcagaggagggctggcaaagaggctctgtggtcatctgtgctgagaggtggcctaaacactacatcctaaactctcagagcatccaccttcaaatatttacctgactggctcctgcctctgggagagtctctgtctggactgtcaacaccagccagaaaagcctccctagttaaaaaacgaaaaaaaaaaacccaacaccaatatggccaacgacaaaaatccactaatcccttttggatgcccttggatctttgtgaactattttacggcacgcccaacaccgtgctctacccagtgaaacagtgaatggatgaccttggttgctgctccgctattcatcaccatgatagtcaggaagagaaacgtggaaggcttctccatattccaaccattctttcttcctgcatcttaagccctttctggttttgttgtgccggtaaaaaaaaacagctttgtgcttctcattcctgaagacaatgaatgcgtcagtaacacagctcccctccatgccataagggcagggcttgttccctgttgaatccagcttctctacactgtgattggcacagggcaggcatttcatacataactaactgagtaagacaaaatgaaataagtgagcaaatgaatacaaagtatagatgtaacagcccacattatttcaatttttctatcctgttaagccttaacattgctttaagcattccccttaactgctacattcctcatatggtccagataccccaactggacaagggcttctgaaagggcaaagctattgcagtctgtacctcactgggtatgtcactgcaggcccagcccgaggtgaggctcaagggaatctaggagagggtccctgcctccaagggctgagttcccaccttctttttttggtttgtttgtttgtttgttttgagacggagtcactctgtcacccaggctggagtgcagtgccacgatctcggctcactgcaacctccactgcccaggttcaagtgattctcctgcctcagcctcccaagtagctggaattacaggcatgtgccaccacgtccagctaatttttgtatttttagtagagatggggtttcaccatgttggccaggctagtctcgaactcctgacctcaggggatcagcccgcctcagcctcctaaagtgctagggttacaggcgtgagccaccacacctggtgaattcccaccttcttgtcctgtaactcagcgtgtatcttgcttactgtcggtgggacgatgtttttaatgtgatggttgtgcttgctgtgttttatgggcccagcatggcacagcattgctgccggacctacacaaacttgcatagtctgtcttttctgtcccgaggcacaacctatgaatagagcttggctactgcaggtgccactgtgggtgctatcaggttgggcatggagacgctcccgcctgtgccccggggtgttggcacaaggaagcagcagcattgcagctagttcccctccctggcacctggctgcctggtgcccccactggactatgaaagggggaatccaggggtgatgtgggaggcatcaacagaagagagtggacagagagcctgccacgagagagggccatgcacaccctggacacccctgcactcagtggactatcttctcagttgtagatgccccctgtttgagggctgctttctctgattggtcaaggtcactttcaattctgttctgccttttgagtccatggctaccccacccagcttagtgtcagcggcaggctggatgagcaccttctcagtgccatttcccgggtcactggtaaccacattagataatctggggcctgccccaccctgcacctacccaagcctgaccttgctgggtgacaggctgctgtgtctctggtcctcctccagatccttcatcgagatctccaacaactgcctgtccaaggcccagctggccgaggtggtggagtctatgttccgggagtcgggattccaggacaaggaggagctgacatgggaggattttcacttcatgctgcgggaccatgacagcgagctccgcttcacgcagctctgtgtcaaaggtggaggtggaggtggaaatggtgagtgtgtgaggaatggttggcgtcagggagggggggcgtgtcctcaaaatgagagttcctggtgggcaggacccaggtcttactcttttctgagtccttggtacctagtatagaaccaagcacatgtaattgggatggcacatgtaggtgtgcaagttgcctaatgcacaatgatacccactgaggtcaaggagcaggttgaaatctatcctacacactgctcaaagccaccggcattgctctaagatgtatctggccagaggaagaggcattgtttcttttacacaaaggacctgcagggttgcatccacctaagaggatgtcccctttcttgtgcaaagttgccacattgtctgccctgtgtacagtgagtgcttagtctagggaatgagggaaacaggactcgagtcagagatctggacatgactttcccagaagggaggagggcacagtctcccatcctaccccactgcccttgtggggaagccagtcctgcctcttgttcttttctctaggtattagagatatctttaaacaaaacatcagctgtcgagtctcgttcatcactcggacacctggggagcggtgagcaggaatggggctctggcaggttggcctggctgagccccctgcagagaaatgaagggagtaggactggctgatcagcccctggtaaaatcaggcatttgccctttgaaagtagctcatggtagcacaaacattccagctgcctctctcaccctatgctgctcggatgcttggctctctccctgctgctccaggccagaatcattctacaaaacaaatcatgagatcctattaattcattttgtgccttgccccctgcctggtaccaggagccactccctacctctaccccatgctctgcccagggagttgttctcctggctgcaaagacaaggggagaacagccccatttctttttctcagctcccacccccagggactggggccccctgccccagaagccccagagctgggaggccctggactgaagaagaggtttggcaaaaagtgagtgtctcccaaatccctgggcccaaagagacatggagagaagtcttagggtccctaggccccacccacatatccttgacatataagcgaccatcctgagtctcattccatttgttcctgacctgactgagaggttacagtgttgaatgacttttcatcctcttccagcctctgcaccccattcttcaggcaagggtcctggctcaacaggatgatagtaaggggtctcctggctcctgcctgctttgggcacagccttgaggcctgtgctgggatcaggaagaaagaaggataaaacagacaggaggagggggagtagcagggagacagtgagtgggtggatggagcaaagacagaagtaaagggttggaggaggaagaagcccccagattgcttttttccattcatctgttgtggcccatcctgatgcctgccagatccccaggtcacctttcatggagtggcattaagggaaggccagagggcccttaccacactgctgccctgcctccccttgctatagggcagcagtgcccactccccggctgtacacagaggcgctgcaagagaagatgcagcgaggcttcctagcccaaaagctgcagcagtacaagcgcttcgtggagaactaccggaggcacatcgtgtgtgtggcaatcttctcggccatctgtgttggcgtgtttgcagatcgtgcttactgtaagagttccaggctgtgggcagtgggtagggagcaggctctgacccttggagaggagtggaaagccctctgatcctaagagtctgcatgggagagcccagggctcgggaccttggccacctgtgccaagctgatgtaacctcactccggccccagactatggctttgcctcgccaccctcggacattgcacagaccaccctcgtgggcatcatcctgtcacgaggcacggcggccagcgtctccttcatgttctcttatatcttgctcaccatgtgccgcaacctcataaccttcctgcgagagactttcctcaaccgctatgtgccttttgatgccgcagtggacttccaccgctggatcgccatggctgctgttgtcctggccagtacgtgactcccaggcttcttcctctttgctgcagcaccctgggtctagttgggggaaacagtggggagatggaactccttatacctccatctctcctccctatgcctcctctctccctcaggatcggaggtagagtctgtcctggttggcatctctaacagggtctgtctcttccagttttgcacagtgctggccacgcagtcaatgtctacatcttctcagtcagcccactcagcctgctggcctgcatattccccaacgtctttgtgaatgatgggtcagttctggggatggtttctcctgggactcatagggtgggcccaagggtataatagaaaaagaaataggcaggccgggcgcggtggctcacgcctgtaatcccagcactttgggaggccgaggtgggcggatcacgaggtcaggagatcgagaccatcctggctaacacggtgaaaccccgtctctactaaaaatacaaaaaattagccgggcgtggtggtgggcgcctgtaatcccagctactcgggaggctgaggcaggagaatggcatgaacccaagaggcggagcttgcagtgagccgggatagcgccactgcagtccagcttgggcgaaagagtgagactccgtctcaaaaaaaaaaaaaaagaaagaaataggcagggcacaatggctcacacctgtaagcccaacactttggaagtctgaggcaggaggattgcttgaggccaggagttccagacaagcctgaacaacaaagtgagactccatctgtacaaaaagtaaaaagattagcggggcattgtggtacacatctgtagtcccagctattcaggaggctgaggcaggaggattgcttgagcccaggagttttaggttgcagtgagccatgatcagtaccactgcattccagcctgggcgacagagcaagactctgtcttgaaaaaaaaaaaaaggaaagaaatagacagtcccagacactcagcaagaagctcagtgctaagctagtcccctgggggaagctgaaaggtaaatttcttgccttcaagaaggaagctggctgtgattggccaggaaaggtgtttgggagatgaagtcagagactctttctcatagatacctgacacacagcttgccatctctgccttctatccattcactggacagacatttatgcagcatgtcccatgtgtctacccagatgccagagtagggatgtcaagatacatgcagtcattcaacaactacttaccgagatttgctgtgtgccttgtattgttctaagcctagggatagagcagtgaatgaaacaaaaatccctgccctcatggagcttacagaataatgaaccagggactcaaggaagcaggggtcaaccacagtaagagagttcaggataacacagaaggaaaaattgctgagtacagagggtggaaccatggaagcctgggtgccaagttccttggagggatccctggccaactgggtggaggccccataccctcagcagtcagggccagcaggaaaggagtcatgctgtgttgtgacagtgctggagcccctcctgccccagtcagaggctcaaggtgcctttgccccccaggtccaagcttccccagaagttctattggtggttcttccagaccgtcccaggtaggaaacgtgggacctgggggttctgtctgaggacttctgcttttgtctccatctctctgtgaatactcacttgtctatactggccatggggtctgtttctagccttcaggacaagccccagctcaaatccctccaggcaggcttttctgggggccccggagggatgagagaggaaggagggaaggataggggaatgtgctgttgtcttttcagcccaagctgaagtcctgagactactcactggccctgtcttcctgcccccaggtatgacaggtgtgcttctgctcctggtcctggccatcatgtatgtcttcgcctcccaccacttccgccgccgcagcttccggggcttctggctgacccaccacctctacatcctgctctatgccctggtgagggacttccctgggccagcccatggagcagggagctcaggatgggacaggaaggtgaaagagggagaattggatccaagatctcagaatgagactttgagatttaagaccccagacctcagccctatctccccggcacaggcctagtgcctgggcaagaggggatgccgggcaggggcctggctgggcctgagttgtactaactggccgtgtctccagctcatcatccatggcagctatgctctgatccagctgcccactttccacatctacttcctggtcccggcaatcatctatggaggtgacaagctggtgagcctgagccggaagaaggtggagatcagcgtggtgaaggcggagctgctgccctcaggtatcaggcccagcctgacctgggtcgggagcgacagaggccaaatcttcagacatggggagacagttcaccaggtctcctgaccccatcactgcctctgactctgtctccaaaaacaacaacaacaaaaaaccactctcgggggttcctgaaggtttcctgatagaagtagacccagaaagggctgtgcttagctcccaggagacttgcagatggtgagaagtgacctgagaagaggtggctgaacgtgcatacagaggggtttgaggatgggaaagggccccacatgtgtggcctgggtgcaggggaagtgcagggcaggaagccacatatgcctgtcccattccttctctcagagacaggcaaatgcccagattgccagtctgggttgttgagagtcagtgctggccaaagtcgggattggtatcatcatagagggtggcaaaagatgattttatgtatctcaggactgtctaaccttcaggactcatgttgtaaaaaaattaatctcattgcaatgttatttcaattgagattacttaaggacaaaatctcagagtggtgttagtatgcctttctactctccagcacttgctgatctcctttttcaatgaagagatcaggcctgaggctcagctatggtacaaacagtatccagctaaaatttggtaacaaaatatgttgtcttctatgtaggacacatgatactggttttccacttaccttagcaataaagttccctgccaagattaattgaattggaaaagttagtcaatttaaagaaaagtgttagataaatgatagtgcaggaggtgtgtagaaaggtaaccctcaaatggaggtctggtagccactgagatggtccctggtgagcctgagtccctttacccagcaggttggtattcaaggcagtggtatgaggcctgggccttccatgggaagagggagtagagaggaggagaggggctggaacaggggagcagagaaacccagctcttgcattacctgggaaacagagaaggggaccctcctactcccagccccaggagccccgcttgctcagaccatgtgactactccccaggcctcaggggtgtgaagaggacaggtgcctatcagtcctcaggtaccaggagcaggccttctcatctgtgcttttccctgtctatgacctccaggagtgacctacctgcaattccagaggccccaaggctttgagtacaagtcaggacagtgggtgcggatcgcctgcctggctctggggaccaccgagtaccaccccttcacactgacctccgcgccccatgaggacacactcagcctgcacatccgggcagtggggccctggaccactcgcctcagggagatctactcatccccaaagggcaatggctgtgctggatacccaaaggtgcccgtcactgggaaccctgcttccgggcctctggcactggcagaggatctctgcccttccctatcctgagactagaagctccagccgtcccaaagccagcctgggagaggaccggggtgcctcagaaaagactaggatgttctgtatcctccctctgcctgtgtctccgtttctggtctcagagctggggcagggtcaggctcatttcatctcccccctctcttggcagctgtaccttgatggaccgtttggagagggccatcaggagtggcataaatttgaggtgtcagtgttggtgggagggggcattggggtcaccccctttgcctccatcctcaaagacctggtcttcaagtcatccttgggcagccaaatgctgtgtaagaaggtgagcatccctccctcattcatcaaatggggcataggtggccgaattgtgacccgcatcaagtggtggagcatgagagaaagctcctggctccaggaactgagtctgaaggggtcattcttacccagtggttgagatgccaaacttggagggaggttggtggtatagccagaagggcctctgctgggacctgtcagttggaagcctgggatcaggctggtgggtcctgccacagctttggtgtctgcaggtggtctggggcttcccagcctctcaggtgaaggcacctgggatctagggaggctgaactgagctgggtcctgatctccagccctgtgtccccagatctacttcatctgggtgacacggacccagcgtcagtttgagtggctggctgacatcatccaagaggtggaggagaacgaccaccaggacctggtgtctgtgcacatttatgtcacccagctggctgagaagttcgacctcaggaccaccatgctagtatgtcagggcccgccaggcagggcaacttggcgggcagatggattggcagcgtaaggcaggatggccagggcaggtgggtggacggccaggctgagctggcaggaggcacagagctgatggcctgatcctcagcctccagctccctcccctccccattctctgtctcttgggctatgtgggctggctcgggctgagtgctggccctgactgtctttggtctgacctgcccctgtgcccccagtacatctgcgagcggcacttccagaaagtgctgaaccggagtctgttcacgggcctgcgctccatcacccactttggccgtccccccttcgagcccttcttcaactccctgcaggaggtccacccacaggtcagtcccactccctcccaccctgggactctggccttctcctgccaggacatcctggccctgaagcaccctgccactctgttctgagcagagaactccacccgattgcctggccccaggatgaggtcagctgttaaagggggacttccaccccctccacgttaagcctcctcctcaaggcctgggcttgaagccttagtcattccagccaggctcaggaagcagcttttcccaaggagagtgagcacctttaggctgcaggcccctctctctctccaatctcctgacaggtgcgcaagatcggggtgttcagctgcggccctccaggaatgaccaagaatgtagagaaggcctgtcagctcgtcaacaggcaggaccgagcccacttcatgcaccactatgagaacttctgagcctgtcctccctggctgctgcttccagtatcctgccttctcttctgtgcacctaagttgcccagccctgctggcaatctctccatcagaatccaccttaggcctcagctggagggctgcagagcccctcccaatattgggagaatattgacccagacaattatacaaatgagaaaaggcaggagactatgttctacaattgcagtgcatgatgattataagtccacctgtttatcaacggcaccattcctgcagccctccagacttcctgcccttagcaagtgcgcaaccagtcaggatctcccaaagaagataaagaccactcctcaccccagctcaagccatggcaggcgtggcaagcaaagtggggaggagacagtccctgcttgtgacaagtgtggaggtgaaaaggtacaatagtgcttgtctccgatagctccccacatctctaattgacttccacaaaatcgatgcgttgctttggtatttgcttggactgacatttgagggaggaggaggctgggatcctctggctgagaatctcctcagagcccagtgcagaagctgtgatgcttagaacctggacagcccgactgcctcaactctgtctccaggtctattccctccagctccaaaaggagcagccctacttctaccccttcccgtccccaaagtgtcagcaactttgaggagggcaccaggaaacaaagatgcctccccagccctgatattcttgatgtcaccagtgatacccactgccctgacccctgggcaggcccctctctgcatctactggagtggtccctgggctctggggctgaaggattccagcctctctgccagatattcagtactcgatctcaattcccctcttccacaagagttgggtgaccagctgtcctagtttgcccaggactctccctgttttagcactgaaagtctcttgccccaggaaaccccatcagtcccaggcagattgggacagctggtcaccttacgcaagagccaggctgaaacatcccctccatactcagctctttaacttttcttttcctttttcatcgggctctttcctaaaaagctgagctgtaaaatattttacatcgaggtataataaataatcatgtacatgttttaccaccacccaggtcaagacatagaatgtttcaacatttccatcaccccagaaactccccttgtacccccttccacttcgtctcccctagctcctagaagcaaccactgatgtgatttctaccaaatccagttttggtcctactaaatatactcttttgagactggcctcttttactcaccataatgcctttgtaattcatccatgctgttgtgtgtatcagcagtttgttccttttcattgctgagtagtattctattgtagagatgtaccacagtttgtttattcttctgttgatggacgtttgggttgtttctaattttgaatgattataaataaaaattctgtgagtgttcttgtaccta

SEQ ID NO: 762 - DNA, 17949 bp, Homo sapiens
gagcagagtttcagttttggcagcagcgtccagtgccctgccagtagctcctagagaggcaggggttaccaactggccagcaggctgtgtccctgaagtcagatcaacgggagagaaggaagtggctaaaagtaagtgttactgctctgggatccccagacgggatgctatctggaaagggctcgggacgatggctcaggtaaccccctccattcccaactcccagtctcctagatagtggggtgacaaggacaaggaggcagactgtgtgactgtgtgtggctggggagtaagcgtgcatatcgcagtgggacgagtagggatgcacgtgtgtggaagccccccatccttttctgagaaatatcagcaggtgggaagggacctctgtggtcagcatatgtaattctactctttcagcttggtctgtgcctggatttcctaactcctcatagttgattaactgtgtggccttagacaagccacctaacctctctgatcctcagtttcttaatctgtaaaacaaagatagaaataacacctatcattcagggtcaatgtgggttcaaatgagaaaacacaggtgaaatagctttgtaacctctagaatgaaataggaattgtttcatatttttcagtttagtttaattaatcaaggatttattgaacaccaacagacctggaattagatagtgcgcataaagtatggcacctagcaagtcctcttccattctttgaggtttcccacttgtggctttctggcaaaggcatgttcagctccttttttctgggcttccaagaacctctgaaatcctttgcaattccacctcgctttgctctagcagattcctgccatgggagacataaatgtgtgtcatcgcatcatcctgcccttcctagaggtagaaaaaaagaggtcctcacgggatcactgagtgaggtggagctgagccccacaggcagcatgatcaactcctgctgttcctcctggctctgcagccagcagatctcagacatgggcttcccctccctttgcccatcctgacagcagcccaagccagcagtgggaccgtccggcacaagggcagcagcgggtcaagctccatccctgacccccagttccctttgtgcaattgccacagtgcctggggccattgaagctgctcctattttgtgccatcactttcccccttcactaggggaattatagatcctttaacatctggagaggagatgccaatttcaggggtttaggtagaaggcagctgtctggtgcctggacataggtcttcccagagccagatctggaattctctctccatccttgtcccgcccctggatgtgctaaagtagcagaaagaacactgagccaggagtcaggaaagcaactctctctgcttatctcctagtgccgctagacctctgtggctttaggtgataaaaaatggggtcacacaggcttccatttagtaaacccacttgccctgggctttcacaccttcgtctcattctcccttgataccaacgaggaggtaggcagggttggttttgtgatgtcattccctagttgaggaaaccaagacaccgtgagtctatgtgagtggtgtgaagtcaccagcaagtttgaacgatgaggttttggtacagccattttgatatggtcatgaggacattttgatgtcacctaaaaagcaaactatccaacttaaaaaaaaatacctatgcattgtgctcagcagagaccttcatctatgtcttgccctctctctggaggggctggggctggagtcccaatgtcactggcatcgacacagtatggtggagtggaaagaggctttggcgtcaacatgcctggttatacccatggttatgtaacatatcctacacatggtaggtgctaaataaatagcagctaatattttccaggaagaaatttctctgttggcacctacctctgggtccaggtgtctcttcattttttaattttttatttttttgagatggaatcttgccctgtcacccaggctggaatgcagtggcgtgatcttggcttactgcaacctccacctcctgggttccagcgattctcctacctcagcctcctgagtagctgggattacagacccatgccaccacacccagctaacttttgcacttttagtacagatggggttttaccatgttggccaggctggtcttgaactcctgacctcatgatccacccacctcagcctcccaaggtgctgggattacaggcgtgagccactacgcccggccccaggtgtctccttataagaactgccttttccgtgaaaggcagagaggaaagaactgaacaaattctcagttcgctaagattgaatatcctgcttcttcctctctccactgcttcctctcaataggaagaccctctgaggtaaagcagagtggctaagggcctatgctcttgatctagaatcccatctaagtcacttaccaactgtgcaaccttgggcaaatgtctcacctctctgtgcctcaattatctcactcatgaaatggggttgcccattttgtcccatctcctatggtggctgtaaaaatggaacacattaacacatgtaaagcacctggaaaggactcagcgtacgttcttctagcctagcccatagtgcttgtctcctctcttatccacatgagtccaacctaagtagctcactctccatctctctatcttcaaaggatgtccagcaagcagacttctactctcataccaagtccaggggacctttcttcctctgaaaaagagggaaacctgagattagatggacaaaggtttggactccacaccatgagagatgaagtgcagtcactttaactgaacaggagctagttaaatacattttataaaaagaaaaactatccttcagcacagcttacactcctgccccaatccacaattgtggggacatatgttacacatatgttgggatactaacttagtaaactgaaaatgatctagcacatcctagcctcagcagtgaaaaaacaactgctagtttaaggaccagaaaacgtgccctcatgcatgatataatatcatatatataaaacccaataaagcaggtccctttgctcatttaaagagtgataatggggtagtgacctcaaattaggattctgctgtgggtcttggggtcgagaatccctataacccttagatttccaacctgtgtcatgaggataacaacatctatctcttgggttgttgtgctgatggatgaagtcttacaagaaaagaacctagcaaagcatttggcacgtagcaggtgcccaacattatgttctttttcttccttccttaagcaaatcctttaaatccagccccagccaccctgggctggggaggtctcccgagatttgaatccccaggtttggaagaaagtctctggttttgagaggaaggggtctgtaatgattctgaaagctcgaggtcctttcaaatgctactagagaaattgtgcttcaagttttagctttgggcaaagaagagctcctgttcctgaaagcaggggtatcctctcctgccaatcatcccatctaggactggactgtgtgcatcccgctgatgttgccatctgcccgacctgcctgtgcatgcctgatgctctcatccctggcttgagaccatgcagagggtaatgggtgcacacacatgtcccctctctacacaaacatgcacagccacccaaacatgtcacaaaatgagaagtctgggacagaggtcagggtggtcttcaccttggagaagctggcatctgactctctgcaacccaggccaagtccagaggagggctgcatcccccagctcagcttgtgggaagaccactcctgtctcacgcaaatatgaggcagcttgcttatctagaggtgaggacaggaacaagaagcaaggacagctgctgctggtgtgggttcttaaaagcaggcagcattttgtcctcccacctgtgactgcacccaccctgtgccagcacaagtagaaaatggtagatctcccaggactttgcagccagcccatcccaactgtttctgagacttcctggcctcctgaaagctgctcccacctgggagcatctcccatggcagcttgcagtgcccacgcaggtgatgacatcccagctagtgtcccctgattgcttccatgttggagctgactggtatttggccaaggccccactccaggcattaatcattgacctggtaagaaaggtctggggcaattaaccggactcaagagagcctcaacgttgccatctgacacccatatttgttcccactccctccctttattcttccaaagaactgcagaaacaaaatacctttatattcacaaggaaataaaaggttccttgctgggaaattcccctgcaacaaagaaataaccaagataaacaactctattgcctttggctcaagctggtgaagggagtctgggagcaggagcaggggccagggtggtgagggaggtctgggagataacgcccagcttcctcctgcttacagcgtccttatctttatgggcactcattactgcccaaacttacgatcatttaacactctctttgtcaagacaactccaaagtttaaagtctgtcaaagtctgggaaagtggagacttctgtctcctcctctaggctgtagttggggtcttgatgacagctgctgtcaggcagacccctgggaccctcaactctcctcagccctgggctgtgtccacggtggagacaaagtccacacaggctgctccgtctgagtggtctcatcttcgattcttcatctttgtctgccaggccttaccaggcaggattacaaagaccctaacacctaagcttttaaccccaattccataaccaagttgctgggaaaacgtaagcctatcattcagcatctcaagacctcaatgttttatccataaaatggttgtgattatacccgtctgtcttatttcaagggaacatataaagctcaaatgaaataatgtaaatggtagtgctttcataagcaacagggtctctacaaataacacaaataagcataaggtaaaagcatgctcttgtatttggggtgcgatacagtagtggagaggttaagcacatggactttgcagtcagacaaaggtgggcccaaatcttccccgacccccattctgtgtacccccacacatttaaccccatgtgcccttgaggaaagtacttaaccttgaagccttcatttcctcccatgtgaatgtggataaggatactaacctcacagggctgatatcaagtctgtatgagatagtacacataaattattcaacacagtgcctgagacagaataagggagcaatcaatggggttaggaccatcatcattacatttacagccttaataatcatgacacctcctctgtgggtctcagtttcctcatctgaacacactgtgaaatatgtcagcccgcttcacctcccaggaatgtagggagggcagctgaaacagagagatgggggccacgtattggtaggaaccaatcacccagcaagccattcctgagatcttacggtgtgcctgggactgtgtctcatgggcagggaaacagagcaaatgacacaatatctctatcccaaaggagcttgcagcttagttgagaagacaaaagctacttctagctattaaggatatacaagtgttgaaggatgataagactttgaattgttatggaaaaagtggaggcactgattcattcaacaggatttatgtcagttgctggagatacaaagccaaatagatgtcacagaaactctaaggtcaactagtcttggaagacaaggggcgcttcatctccttgtgattattgtttttcagcattgcacaggagaagtcggcctgagtggtgcggcgctcgggacccaccagcaatgctgctcttcgtgctcacctgcctgctggcggtcttcccaggtgtgtctgccaggccccaactctccaagctccaccccttcagcctgcccgactccagggttcacctccctggggacactaaaatcagactcatccccagggatgtccctctcaaagttggcacttccttgaggaagagtcatacagagaagacactgaaaggccacatctgtgagcattggaagtcagggacaggaatggcacttcctaatctcaaggccaggggtctgtgaaagatcttctttgagaataacaaagaccttaacttcaaccaagcatctctatgacccgctgtgaaatctgagggaagtcacttatcctttctggctctcaatatttttatctgggggaaaaaaaagaaaagaaaatcatctacaaagtgcttttagaaatataaggaaataacacatggcaagtgcaaacatgtaacaccttacgaaagtggtgttattgtttgaaaaaacaatggatggctggatgctggctcacagctgtaatgccagcactttgggaggccaaggagggtggattgcttgaggtcagtagctcaagaccagcctggccaacatggagaaaccttgtctctactaaatagaaaccaaaattagctagcatgcacctgtagtcccaactacttgggaggctgaggcatgagaatcgcttgaacctgggaagcggaggttgcagtgagccgagatcgtgccactgcacaccagcctgggcgacagagagagactttgtctcaaaacaataaaaatatataaaataaaaaacaagggttatcataaatttgtcattcccttgtccttgaaatggttatcattaatgaataacaattccaatttaatcatgattaaaacagtcactttatttaatctcagcaattttccagctgtgatatatgataaattatcaacacagggcctacgtgtcaggtagaaaaccacatctactcatagtgggttatctggaacaggctttacctcccaagggcctcagaaagcctctctcttctgttcccacagccatctccacgaagagtcccatatttggtcccgaggaggtgaatagtgtggaaggtaactcagtgtccatcacgtgctactacccacccacctctgtcaaccggcacacccggaagtactggtgccggcagggagctagaggtggctgcataaccctcatctcctcggagggctacgtctccagcaaatatgcaggcagggctaacctcaccaacttcccggagaacggcacatttgtggtgaacattgcccagctgagccaggatgactccgggcgctacaagtgtggcctgggcatcaatagccgaggcctgtcctttgatgtcagcctggaggtcagccagggtaaggatccaagctccttgggcttctgggggaaagttagagggaattctctaaggtgcatggagggcttgaggaggaacttcctgacaaggatgtgtagccgggttgggggtcagaaggcacccctttccccaggcaaagacttctttaacaggagaaggagacagatagggcctacttgggggtgatgagtgaacccttctaggacttggtggcctataacattttaggctttctggagaccccagcttagaagggtatcagaaggacaagttttctggtgtttgctacaggtagaaagggaaatctgacatcaggctaaggagatagaaaaggtagggagagatttacagggatccttaaattcctatcattaatgcacctttccatcaaggtttgggccgccaaaaggcttcttgtaaaatgcatattttttttttaacctgggaacccttagtcttttggtattatcagggtaaattagattattagatcttgaccaaagaccaagatcctgaaaggatgggttgctaacaagcctattctagttggagaaagagaaaaaaagaaaagctctttctgacaagggtttaacaatgaggctgttttagatagtcaagggcaactcaaaagagaggtctacggagaaaagaaattcagggggactcccaaagacatgtcttgctcctttggaatatgcatactattgtctgtggactaaatgaggaggtcatttaggtggggatcaagattcaaaaccacagaatctttagaggtgaagagggcttagagttcaccctaaccggacacttagaagaacatgctgatgacgggtatgcagcctctgattaagcactttagcagaaactcactgctccctgagacagcccatttcacatttagactcttgtaatttttagaaacttctattgtatgcgttgaaatccatcaccctgcatttacattcattctgttcatttcagcacacattaatttggccacctactacccagaggcattgtgcttgtcacagcagaggggtcaaacatgagaaaaacatgttccagccttcaaggaacttccagtccatggagaacataattacccatacaccagattggatgtaataagtgatgcagatgtatcaagaaagcacagggcagggagagattagtgttagcttgggaaaggtttcatggagaagaccgctgtcaagctgggccttccgacagcattcctctgggaaggagggcattccaggttataagtccacccacaccctaactaggaatagcaaatagtcctatgttgcaagaaagtagaatcgtaacttgcctgccccctaccttgcacccctcatcctgcaggtcctgggctcctaaatgacactaaagtctacacagtggacctgggcagaacggtgaccatcaactgccctttcaagactgagaatgctcaaaagaggaagtccttgtacaagcagataggcctgtaccctgtgctggtcatcgactccagtggttatgtaaatcccaactatacaggaagaatacgccttgatattcagggtactggccagttactgttcagcgttgtcatcaaccaactcaggctcagcgatgctgggcagtatctctgccaggctggggatgattccaatagtaataagaagaatgctgacctccaagtgctaaagcccgagcccgagctggtttatgaagacctgaggggctcagtgaccttccactgtgccctgggccctgaggtggcaaacgtggccaaatttctgtgccgacagagcagtggggaaaactgtgacgtggtcgtcaacaccctggggaagagggccccagcctttgagggcaggatcctgctcaacccccaggacaaggatggctcattcagtgtggtgatcacaggcctgaggaaggaggatgcagggcgctacctgtgtggagcccattcggatggtcagctgcaggaaggctcgcctatccaggcctggcaactcttcgtcaatgagggtaagaccctagagagggagggggagtaggtggggcagtctcgcaggtgagagccaagctcagctccctctgagtgtattcatcaatagtcatcaatcagccaacagcatccactcaatgaccagccccgaactggaggctgcgtgggctgctgcacaggacagcaagaaaaagcaacctctgcctgatggcagctcctaattactcttctgttatcaaagtcattttgatggctgtccctgcttaacaagcaagaggtgagtaaagctcttgattgaggcaggacttatagactgtgtttcagggctgtggcaggctctgcaggggtcctctgtcccctcccctggcccctgaacaagatgggtgcctcatccctcacattcagatggaaaaaggattggcttatcttggtctcaatgcgttcccaggagtgccccagcctctaaatgtttcactgtcacatttcgtagggttatttgtgaatttcagcaccatctggcccactcagccctactccagtgagccatcagcatggtgaaagaattaaatcccagctccttctcatcccagagcaccctgcatagagttgccctcgtgagaagcagcaaaccagtacttgcagttccaagtatctgtgcttgtgactttttttttttaaaggggcttatattctctgcatgccatgtccacatccagctctgggttttcaccagaatcccctgcatctttggtcacctgcttctctctggatctcagctttagctgcctggagaatggctatcgtctttgagatgccccttggggccccaacaattaagctcacctttgctacatactttatagtttacatcataccatcctaaatatattttcttgatttgggcataatccattgggccacttttgtggaatacacttgttagtgtactaaatagacaaaaacctacacagagggagactttgtaagaagccaaagaagagctgatatcctctccttcaactccttccattctctgctcagaataagatgggggaaaagaacaacatgtgcaggctgatggggagactccaagcccttggagtctggccctgatggctccagctgcaggctctgtgacattaggaaagctccttttcattttctgaagagggtaaggtgatgcgtgtaaacttcactccccatcctggctgagaccccgggaagaaggcttctcaggccacgcaaggctcttcctgcgtggccatcctcccatcccatctctgtctgtgcttccagagtccacgattccccgcagccccactgtggtgaagggggtggcaggaggctctgtggccgtgctctgcccctacaaccgtaaggaaagcaaaagcatcaagtactggtgtctctgggaaggggcccagaatggccgctgccccctgctggtggacagcgaggggtgggttaaggcccagtacgagggccgcctctccctgctggaggagccaggcaacggcaccttcactgtcatcctcaaccagctcaccagccgggacgccggcttctactggtgtctgaccaacggcgatactctctggaggaccaccgtggagatcaagattatcgaaggtaggagttgacagggagggagaaagctctaaaacctctccagccagcagcagcatccccaaccactcttcctcctttttcacccgcctccaccctgatgggccagacctcaggagggagcccacctatccagaggtcacattttcatgcctataacacgcaccttacactctgaattaccatacatggtacctcctactaccaagaacatgggcttctttcgcagtgtgcaggcatcagctgaagtcaaggattgcagatacctctttgtattgagtctagaagagaaggaagagtgaggaaagcaaactgaagtccatgtgtgaagatctatggtctatggtagactctggattgatcatggtgctcatcaataataattattacctaggcacacaattacatttcttctgtagtcagaataacatacttatttctaatgctatccaaagaggatatgtagactgaacatggtggtgcatgcctgtaatctcagcaccttgggaggccaagacaggaagattgcttgagcccaggagatggaggctgcagtgagctatgatcgcaccactaccctccagcctgggtgacagagagagaccttgtctcaaaaacaaaaacaaaaatatatatatatatgtatatgacatgtggacaaagattcccaccagagtcacttccctgcagcatctccaagtaccaacttctgtgtttatttctacctccctccctcctccaggagaaccaaacctcaaggtaccagggaatgtcacggctgtgctgggagagactctcaaggtcccctgtcactttccatgcaaattctcctcgtacgagaaatactggtgcaagtggaataacacgggctgccaggccctgcccagccaagacgaaggccccagcaaggccttcgtgaactgtgacgagaacagccggcttgtctccctgaccctgaacctggtgaccagggctgatgagggctggtactggtgtggagtgaagcagggccacttctatggagagactgcagccgtctatgtggcagttgaagagaggaaggcagcgggtgagtctccaaggacagggcctgcacccctcagacccagaggcaggacttcctgaaggcccctgcctgagagcttctcaatcagtgctggcccctatgtttggctgtaagaggctgaaagtggagagtgggaagggaggggacatttaggtcctatatagcctcgttgagcccttcaaaagggacatctcaaataaacataccaactaagtaaaaatagtgggtttgctatttaacctcggcattaagacaactcccagctgaatgtggtggctcacacctgtaatcccagcactttgggaggccgaggtaggcagatcacttgaggccaggagttcaacaccagcctggctgacatggagaaaactcgtctctactaaaaatacaaaaattagctgggcatggtggtgtaatcccagctatttgggtggctgaggcatgagaattgcttgaacccaagaggcaggggttgcagtgaactgagatcgtgccaccacactctagcctaggcaacagagctagattccatttcaaaaaaaaaaaaaagacaagtcccatagttgccacttcaacccagattgaagtctcttctatatctggaaatattcttctctgtatagaagaataatatgcatacatcactgtcatatgcaatatgttcatcccccttccccctgccaaagctcgccctcgaaagagggccagataccttcatttacaaggtctgatcaggaaaattaggaaacatctagtaaatttgcatttcaagtccccttttaaaatttcacatgaaatgttttagccctaataagggtatttgtagtccctcaagaaatcctattgggtctggaccctgcggatgggactcactgaggggcccatcgccaggctacctccagggggcagcactatcatacccagctgggcagtcaggaagcctggggcagcgtctcagagccttgaaaatctcccgggcataagtgatgggtcagcctttatgcacagctggtctatgacacgaagccttgaaggtccccactatacttttggtagtaatggggcagagatcatctgtgacagctgaagaaggccatcacagctgtttctaatgtcatcctgggtcctaccccaacagccttgagatcgaaccctgaccctgtgattcctcatgaagtctcccccagactccttcacctcgaggagtaagagcatagagaaaaatcacaacccaggcccactcttccctgctgcagggtcccgcgatgtcagcctagcgaaggcagacgctgctcctgatgagaaggtgctagactctggttttcgggagattgagaacaaagccattcaggatcccaggctttttgcagaggaaaaggcggtggcagatacaagagatcaagccgatgggagcagagcatctgtggattccggcaggtaaggaaggattcaaggctccccactcggagaacaccccagagccgagcacctgaggctgggccaccaggtccaaggaggaaagcccatctgtctcttgagcactggggcagcccttactacctctgcttatatgtgggagggtcctatggtaccctctgcccttctcccatggctggggaggtgtttacaattcagttcaatcttccaggcctaggatgcaacaaggcccagtgcgtgcctttgccagtctgggaaggcttcttagaagaacagagctagggagctgcatcagcagggtggggtggataaacctgggaggaaaaaggactaagccaaccttgccagcacatcgtcgggcccccagatctcccttccagggatgaactaacttaagccttcttccagctctgaggaacaaggtggaagctccagagcgctggtctccaccctggtgcccctgggcctggtgctggcagtgggagccgtggctgtgggggtggccagagcccggcacaggaagaacgtcggtgagtccctgggatactccctgcctcccacctccaacccgagccctcagtcctgaatcatccacccatagaggaagctgctgtgtctcttctttttcatgagctaaaacaaaggatcccgagaaagcaggatggggaaagataaacccacacatactcgaaactgaaattcagagctgctgtccaaatactaacactggaaaatcatctccaattacccaggatctaggttcagagacagggctgccaggaagaggagattgggtttcaggagaccctgggcttggactaattggataactaatgagctgtgtgacattgagccatccttatgccatgcctcagtttcctcatggctcaagtcaaggatgataatcaggacctcacggggctgatgtgaggaccaaaggagatgctgtgcattgaaaggtcccagagtgacaaagatcagggattaccaagtcctgattacccaggaaaagggactggggaggagactcggatcatttccatccccctgggtcatagtcagagctgcaccacctcagctgtcctgcagggctacagtggatccgcccagagagaagcagcccagcctggccttctaggtcccagcccctgtccttacaccaactcctcttcctcccggacagaccgagtttcaatcagaagctacaggacagacattagcatgtcagacttcgagaactccagggaatttggagccaatgacaacatgggagcctcttcgatcactcaggagacatccctcggaggaaaagaaggtatgaccctcactcaagggaatgctcagcccctggggagagtaagaattggtctcacatctgggttgggaaaaggaggctagtaagggctaacctaccctctttcttcacacagagtttgttgccaccactgagagcaccacagagaccaaagaacccaagaaggcaaaaagggtgaggaggaagaaggaagccccactacatgacaaagaaatgcagcatgaggggatgcagttagacttcagaaagaactacctcaacatgggggccgatcccagaatagggaggatgatataaatagtcctcaggagtcctcaggactttttgaggaagaactatatcttactggttgtgggatgctgatgtggataaggcccaggaaggaggtgagctatatgattaggctgtaaaactgcaggagagaggcaggccaggagatgaggaaagcaggtgcataaaagatgggaagctacaatgccaaatgctggtgattaaatggatgctcttcctgggttgggggacccaaggacctcaggccacacatcctcccttgagggtttgctcaggaccagctttttgcctgggcctaggagacatttgcttgcggtgggcagtttgaggctagaagcccctgctcacttctcttgaagccccaccagaggcaactcctgccttgggtgccatataccatcccctcaatctgccctaggactcaggggaccaagaaaaataacatctcatgcctttaatcccgaggtgagagtttttgttgttgttgttgttgtttttatcatatctactttttcttgaaacatctctggcatttagcaaagttagaacgagttattcctgggacagccttcccctttaactttgtggtgccaaaaagctacctgtctgggctggtggagaaagaaaaacatacaccaccgtggttgaccccagcctaggccaccttgcccgtggactgtgtgggcagcttccggggacaggcccgggcaacagaggcggttccactccgtgtgtcagaaggaggtagtgagacagaagaagatatttttagaggctgcaactttccatttctcaaaatgcgtccttcttggtgagcatgggggctgggatgagaacagtgggccccaaaggcttgtgttgcttggaccaagatcacgaattcaggacattaagcacctcccctcccctgactccacccactgagccagtgcccccaacactgatgcctctcctcttgccccttagtcatccaaggaggaagccgagatggcctacaaagacttcctgctccagtccagcaccgtggccgccgaggcccaggacggcccccaggaagcctagacggtgtcgccgcctgctccctgcacccatgacaatcaccttcagaatcatgtcgatcctggggccctcagctcctggggaccccactccctgctctaacacctgcctaggtttttcctactgtcctcagaggcgtgctggtcccctcctcagtgacatcaaagcctggcctaattgttcctattggggatgagggtggcatgaggaggtcccacttgcaacttctttctgttgagagaacctcaggtacggagaagaatagaggtcctcatgggtcccttgaaggaagagggaccagggtgggagagctgattgcagaaaggagagacgtgcagcgcccctctgcacccttatcatgggatgtcaacagaatttttccctccactccatccctccctcccgtccttcccctcttcttctttccttccatcaaaagatgtatttgaattcatactagaattcaggtgctttgctagatgctgtgacaggtatgccaccaacactgctcacagcctttctgaggacaccagtgaaagaagccacagctcttcttggcgtatttatactcactgagtcttaacttttcaccaggggtgctcacctctgcccctattgggagaggtcataaaatgtctcgagtcctaaggccttaggggtcatgtatgatgagcatacacacaggtaattataaacccacattcttaccatttcacacataagaaaattgaggtttggaagagtgaagcgtttttctttttcttttttttttttgagacggagtctctcactgtcgcccaggctggagtgcagtggcgcaatctcggctcactgcaacctccgcctcccaggttgacaccattctcctgcctcaccctcccaagtagctgggactacaggcgcctgccagcacgcctggctaattttttgtatttttagtagagacagggtttcaccgtgttagccaggatggtctcgatctcctgacctcgtgatccgcctgcctctgcctcccaaagtgctgggattacaggcgtgagccaccgcgtccggcctctttttttcttttcttttttttgagacaaagtctcactgtgtcacccagactggaatgcagtgacacaatctcggctcactgaaacctctgccttccaggttcaagctattctcatgcctcagcctctcaagtagctgggactacagatgtgggccaccatgtctggctaattttttttttttttttttttttttgtagagacagggtttcgccatgttgacgagactggtctcgaactcctggcctcaagtgatctgccgcctcagcttctcaaagtactgggattatataggcatgagccactgagcctggccctgaagcgtttttctcaaaggccctcagtgagataaattagatttggcatctcctgtcctgggccagggatctctctacaagagcccctgcccctctgttggaggcacagttttagaataaggaggaggagggagaagagaaaatgtaaaggagggagatctttcccaggccgcaccatttctgtcactcacatggacccaagataaaagaatggccaaaccctcacaacccctgatgtttgaagagttccaagttgaagggaaacaaagaagtgtttgatggtgccagagaggggctgctctccagaaagctaaaatttaatttcttttttcctctgagttctgtacttcaaccagcctacaagctggcacttgctaacaaatcagaaatatgacaattaatgattaaagactgtgattgccaccaacgag

SEQ ID NO: 763 - DNA, 61370 bp, Homo sapiens
gtggagcccgggagttccagggcttgggaaggggaaggaaacctctctgaaatctgacacctgctctcccggcaaggaaacttcgcaggctggtgagttgggaaggcgggctgctgctgctggaacgcgttcccacccacccgggtgctgcagcgccggcctgcgccgtgggaagtgaggcctctgtgtgtgtgtgtgtgcatgtgtgagtgcgtgtgcaccttcgatcgcggtttccagcagaaatccttgcaaagaagacagtagtgctgtgtgctgcacggatggcatgggccaactcgacctggctctccttgagtgtttgcttatcaaacagctggttaccaccaaaaaaagcaaaaagaaaaacaaaaagcctaggcacagcaatgccaatttcctttcatttgcatctcaaaaaacaatcaaaataatgaataagaaaaagcatggatgatgatgtgctcagagtttcattccaggaggagcgacttagtgaggcaagccaggagagcaataagacatttatatgcacttccttagatgaaatagccacagagaccttaagagtactttctgttttccaattttttgctctgttactttcgaattctgatctaagtgttgcaccaactagggtatatgtgtgcatgtgtgttcacccaactgatcacaataaattagctttcaagactttcccacccaatgcaacattaattaagcctctgaaaactactgaagtaggtgaactgtaagcagagactgcattcctaggaaaaagctgtgtttggttagagccttcacacctgtatcatgttttgtgagttttttatgtcaagatgtaaagctaagggtatgtaattccagttgttttaaactgcacatcattaaattaagcccaaagtaataacataaatttcaaggttattaacaacaaaattattgtttaatataatacagctctgaattttgattttgttctgtttataagaaaaatgtctacagttctcaatatttagttatattcacacatattcattcatatatagaatatacagggttttatggttataaattttgaaaagttgagggaaaggatagacttaagcattaatataaactcagatatttaagtttaatgaattttcaagctgctgtaaagtccatattgcagtgatgaagagagagacatacctgtcatgtgccattgcccctcaaatagttatttttcatagtttcctagcataatcctctacccagatggggtcagccatccttgaaggcaagaggtgattcctaccaatgaccaaaaaggggtaatcttgacagatagtttaatattaatggagcttttctgtttcagaattgactatggcctctcatacagtgttactgtcattgctttcgaaaggaaaacaaaacatagcagataaaactggatgagcctgttctcatagttgccaagaagggataaagggaatctgttgaatgtaagcaaaccacagttcccctttctcataggtcatttctggaacaggcatgtttgacccaatagggaaggtaaccctaatataattgatcttcttggtagaagatcagttggtatgccagtttacactacaactgtatgttggtttcagaattgctgttcatttatttcactgtttttctggaaaaatggaagttatccaaatgtccaggtagttcagaatagaaacctgctcttttcccaccctcactcctgcaaatttttggttaggtttttgggctctcagatcagtacggcatgaaatatagaacaattactcatataaaactcatctcacaatccagtttcttcagttgattcatcaaggcaggttgaccaatagttcagctcttaagcaagtaattgtaatgttgagatgcaaggaaatgatttcaataaaaacagacaggacaaatcaggtgtttcccatgaagaatatgtcactttctaaagatggctgccaaatgggaatgattttttttttaaattcattattaggtatatatgggcttaagtatatactatagaagtagcaagcagcaacatcactatgcataataacatacctattgtaaaccccaaatatggagttgatagtattactcaatttctttcacaccctttgcaatcattattcatgttctccaaatattaacctcccattggcactccttaaataagacaaacttgtctagattgccaataaggagagtaacactctgtttatcaaatggccaaaaaaatcttaaataaattttgtctttttaactaaacaactgctcaatatattgagataattaagttgcttgttcatttgttcaacaaatatttggtaagagtgttatgcactgttcagggctctgtgtggacagaagtggaccaaaattcctgaccttgtagagcttatcttttaccagggagacaaagaccaacctagataagcagggtgagtctatggcacagtagcaagaagtgctcagcagagagtataaagccgaggaggcatgcagaaagtgtcagtggccggtgtcagggaggactgaaattctagatcagatgcccaggaaaagcctcactgagatgatattttaatatcaatcagaggcaagtaatggaatgatccatgtagatatgtggaggaagagcattctagattgaagcattctggcatctttcaggaacagcaaagaagcccatgaacctggcacagagggagtgagatgggggtagcaagaaatgggggagaggagataatggggacaggtcttggaggactttgaaggtcctaatgaacatgttggcctttgttttttattccaagtaaaatgacaaaacactatgatttagatatagcccgttgaacatttttcaataaatatttactgagcatactatgaactttaatattcgtctaagccctgtggataacagatgttagtgagatatacgaggcctctgctgtcatggacattatatctggggtttggaaagagacggataagtaaataaacaaattagtaattctggaacttttagtgatactaagaagaaaaaatgttaaagggtaatacaatgagagtgacctgaaggggactgtgtgattcggtggtcaagaaaagcctcaggggaggtgattttttttttctttttttttaactgagacagagtcttgctctgttggcaggctggagtgccctggcacgatcttggctcactgcaacctccacatcccgggttcaggtgattctcctgcctcagcctcctgaatagctgggactacaggcatgcaccaccatgcccagctaatttttctatttttagttgagacggggtttcaccatgttggtcgggataatctcgatctgctgacctcatgatctgcctaccttggcctcccaaagtgctgggattacagatgtgagccaccgcgcctggccaggtgatgtttttaaaagatcactctggcttccttgaagagactaagtcgtagggtgaccagagtagaagagaatccagttaggaggctattccagtagaccaactacaacagtggcaaagattagggtcagaacagtggccaccaagagaagtagatagattcaggaaacacttgaaggcagagctgacagaacttactaataaattggataaaggtggaggtgaagaaaagaaagaaccaaatgatcaacaggattcctactgaagacactgggtagacagaaggccatttcctaagatggataaaactagggaagaaatggttttaatgggaaatgaagaatttatttgcagccttttgaagcgtttttcaacatccaagtggaattatcagcttgggcttttgcatatatgaatctggggcacctagaggacatcatagctggatatagaaatttgagaagcaagtggctatggatactatttagagtgatatccttgaggacatcactgagagagagattacagagaaaaaattggggcttgaggacgcagctctggcttattcggacatttgggaccttgtatgggaggagtcagtaaaaagccattcaagtgaaaggcaaaccggaagagagtgtcatcatgaacctaagccaggatgtttttttaggatgaagggtgtggtcaatggtgtcagacagggccaagataaacagtgagatgaggacagagaagtgatgattgcatgtggcggtgtggaatcattggcagctcgggaaagagatggagttctcaatataagatattcagaaaaactataaaaaattctgaaaatagcatttcacctaattctaaagagaattgaaaagaggcccccagaaaaactcatgaggctacgtacatagaagctctaataaattcaattttttaaaatgacttgtagaacagatgaataaaggaaacatataattagaaatacttaacgaaggtgttgtctgagctgtgagcatagtttgaagaagagtaatgcacagtgagccgaagcttgggaaaaaatgctcaggagagcaaaagattattttcacattgtttgaaacaaagcagtgaataaagaagggtcatctccctcttctttcttttctttttttctttctttcttttttttttttttgagatggagtttctgttgcccaggctggagtgcaatggcacgatctcagctcattgcaatctccctccccggggttcaagcgattctcccacctcagcctcccaagtagctgggattacaggcatgtgccaccactccaggctaatttttgtatttttagtagaggtagggtttcaccatattggctaggctggtcttgaactcctgacctcaggtgatccgcctgccttggcctcccaaagtgctgggattacaggtgtgtacaactgcacccggccatgaatccctcttctttctacatgaaagaaaatagccttcaaaatggaaggtctagacaacaccaaaagaaaattaaaatcaaagaaagctgagaagttattgtgactgcaaataacttctttaaatgagaaagactaatggcagaagttgtcaagaggacctctgtgaggaaagggcatttcagttgagacctaaaggttgcctggttgctagtcaggtgaaggggttgagaaagaacaaaccagacagtgcaaaaggatttgctgaattcttaacctgggaaagagcttggagcgttcaagaaactgagaaaaggagtttggagaatggaaagcaggtggcagagagaggcacaaagtgagtctggaggcaccaatggggaagagtcattgcagaaactagacaagaccaatgaagatcaggaagtgcagcaacctaaaacttacttgtcagagctgttatagagatgacttctactgggaggttgaactaaacaaccctcaagctctcatccaaagctataatcctacaaatacaagaacacaatttgtttaatatttgataatgtgttctagattttttaaattaagaattgatagtgaaagtatagttataaaatataaaacagatcaaagcaaattaagtagtagctgccatataaagcaaatgtttaatatccagaaaagcaggaaaaacgtttctaggtagctacagctgtattcaaggataccaagacccactcacataattttgggaacagtttcatagaaaggagatatagacttcatatattggtgggatttaaatcaaaccagtaggaagtctattattagtcaaatattgctagtgttgagtggtgtataactatagacagggcattcagtctccttaaggatcttgattttctcctgtgtaaaataaaaggtaagggttgattattttaacatccctactgttcagctctagacttgggcaacacataattcttgtttgatgtttacttccttccttcttttttccttttcttccttccatttatgtgtctatccctctagatagatgataggtagagatagataaatagatagataaccttagatctacctaagattatctttgttatacataaatctgtgtgcataagtgtatatatatgtgtgtgtgtgtgtgtgcatgtatgtaaacatggaagaagagatagaaacatatgaactctataatagagggaaaatttcattttaaaacgtttagggaaaaagcataagactttattttagtcctctttctggcttcgttctagcacataaatttattttcaatcatattgaacttggggtcaacttaatctgttttcttcttgtttctctccttaacttgctcagaaaaaaaaatgagattatgtattaaatctgacctgagggatataccagaacaataataattagtaaaagcaaaatcagcttgtattatatttgcccaatctaacttaggcaaggtaatcagagcctgagaagttcattaaatgaattattcagttcttatggtctattattcaaaatatattattttcataaacaaaatggactgttgataagtgttcctgtacatatataaatattaaaaatacaaaatgaaattagatttttcagagggaaagagaaactagtcatgtcttagtgcctttgaaaaagtagacacgttttctaatattaagaggtgccacatattgactcaggtgcctccttggagtaacttaagcctctaattttctggaactttctcccaaatgctgcaaaatataggagcaatgcaacctgtttgcaaatttattaattctttaagcgaactaaagatagatatcacagctaactgtatggaaactgtaattcccagtccctatatctatccctttctcactcaatctttgatcttaatcttcctaaggtttgtaatacctattctcaaatactgcctctcaaggtttggaagtaaacgcttctattaggaagaacctaggaaacaacactgcaaaacatacgttacaggaaaaaattgctgtaacgaaaatattctcatatttataaccgagggttaaaacgtaataaaacagacttaaataaataggccatcatgtttgaaaagtctattctttaatcttcagttggaagcaagatgctagttgatgaagcctgcatagcagtaatagtaataagatgaaatgagcaactttgggtttgcttttctcgtgtaaagtcactaggccatcatcagatgctacttattttgaaattggcctatacaatctccccagatctcctttgctgtattttattttttcacttacctactaggaaaaccaagaagacaaaagtaaaatgcacccagcaagtactcattagtattgtttctgaacacgcttaatttgggtgccctcaggaatgtacgtacttgatgagaatttatgcatctgtgattacagagcagcttatatttagataaaggtgaggaggagatgaaaaatggataaagacagaacatactgatcactaggtgcaggtacaccaacctgcaggctttgtgtcctttgtagacttggagaaaccttgctgggcatctgtttcctgtgcaagctctgaggaagtcataaaattctacattgcggttttctttggaaagtgattaaatgataataactgagttgctttgaagatgaatttccctcaaattatattgttattctgcttcccagcagatcttcttatcaagtgtattttccatggttctgattccttacagttttcaccctttcaaagttcactttgacttttaaggtagacttatgcatgaggccagggacccagaaaccagtttcccattcttcagttctagatggtgttagattctagtgattttagtaaaacaaagccttcaaggtctaagtagtccagagcagtgaggttgattcttaaaatcaatatcgtaaatattgagacacatgaaggtataagcttggcaacttgagaacagagaactaactcaaaatagaaaaggaacaattaaaattcataaatattaactatatgtttaaagaaagatgttctgtttgcattgcaatattttataaccagtagaatatttttgacttatttttcaggaatcatgttttctaaaagtgtgtagacattaaaatcggaggatttaaacataaaactgctttctaattggtgttttccacagtaaacatgcattgtgcatagtcacttgatccaaaagatgaaaataagaaatccaagaattaatgacatgcttcaaggagcaaaatttctgcctgttgtaggacattataaacattaggaaaaatgttaagttggttaaagctgatgatgttattacaacaaaagacctggtcaccatgttaaacctgacaataccaatttaatctctggtataatttttgtctatctgattttttgcttaaaacattcattaagtgcctactatctgtcaggtcatattaggtactttagttgtaattgtcagtaagatatagttcctactcttaaagaacttagaatctagtaaaatagagagttacatgagcagataattttaatgtaacttgataagttttcagttagtggtttgaaggcagtattatggtaataaagaggaagataaatttaaggaggttaaaactgtagagagatcagtgaggagtggcaaatacaaaaggtctgaaattgtaaagttggagaagataagttatattaatattaaaggaataattagcgagggtgggcattaaccagacattgggggaaaggagaaattattataaagtctaaatttctggctgtactaaggcaatagatggataaatagtggtcctcaaaattgaaaatcaggcatacaaaaggaaaggcaggttgggggaggaagaagaactgcatttgaggtacctgtggttattcaattgcatacgttcaagaaaatgactcttgaaatctagacctctcaggagaggtcaggctggtgataatgactgggaaatgcaggcacacgggtgatctccaaaatctatgagaccaaatgccatctgtcaaggaggtcctggaaagaaggaggtggagtaaccataagagaggaataattattttctttattttctgcaagcactactctgctttggctaataaagacatttaagttctggaaggacttggggaaaatttaaggttatatatctaattatatatatgtgtgtatatatatgtatttattattaaaatcattgttgttcaattgaaggacataataaatatgcctgtagcttctgtgggggcaatcactaagtaatgtttccttcatgcataattcttttcacctatgttctctcccaacccaccctgtgaaaaatgacaagtcgtgtctcaatcaggaatatgttctagtactagagattgggaacccaacagaaagtgattgaatcaagtgattctggctcattaatatcatgctctaataattgatgtacagccaatgttaatttaagtgcaaattaactcccattctcttcattttaattagtagctttgttctagctctgctgtcactaaattgataacacttttatcctcaagatctacttaccaaagcataacaaaatgtatcttgatgttctaaaaaaattacagaataattgtctagtaatgagtatttgtgtagattccaataatatgcaaaatattgtcaagaaattgacttgaaaaacatgtcaaatgattgaccaaatttagggaaagttaccttgtctcttcttctgcctcttctcttccccttcttcatctccatgttaatattttttttctagtccactgtttgaaaaagtttggggaatattctattacatttataaaaattctttataccaccatctgggtgcttcacactctccatcacaagtatttctgactatttaataattagtacgagaacatattgtatgcctacttgttcgattgagatattctctgtgttctttctggatttcaggtgtataacactttctttgttatggatccatcatttgagacatctagttctgaacaaatatgtttttcataaaagctccctataatatggcaatatctgagttatttctgttgtggagatcatagatggagaacatttaaatgactcttacgagttagacacatacctacaaatattccaggcaagatttctgatacaatcttgtggtctttaattttttttcttaagcatttggctacttatattattcactaaactagtatccaactgctgatcttctatgttatctccatctgtaaattgatcaacctttcacattattttgggaaatatcaatgtgttttttcttgtgttttgttagtaagtaagctaacattatagggacaaatctcttgttttataaagagtatatggacttatatgagacagtaataataaatatggaaaaaggatacaaatattgctggaaaagaagtcctcctacaacttatgatgaacacttgtgaatcattttaaataatgactatttgacatggttatcaagggtgaaaatatgcattgatgttaaacccttgactaaagactgacaataagcaaccccgttttcagcttcaaattattatcagcaaaagcatacattcattgaatataacagggttcaagtctaggctattgtgtaagaaaatcaaaagttttagtaattttgactttaatgggaacagttttgcaaattctgttttttcctactactgctttctctttggaataagtttttacatataacttgctaagattacaagacctttgtgccataaataaacacagcatggaaaagatgaaagagagttaaagtaacaaacattctcccattgtagccataatctgattccagttttaggtaacccaattaccaaaatcaggccaaggaatggtttcaaggcacaactgaactaggtaatgcaggcaacagttaggtcttctccaaaccacagggtcccaaggacaaataaatacaagggcagaaaagaaaaggtttcttatctactaaggtcctatttctttgtcctgatgtactatctagcacccccagatgctgagagtatacctaaaatccaacactaattaagaaaagtctaagaagcagactgaatggtgagtatctgtttgcttttttagcagcaaatatcacttcattactctgactttaaaattaccctgtacacatggatcagaaatgaatttatactagaattacaggagtgaatatttttatgaaatttattccagtgatgtttccagaagtacatttacactatagcataatgtctatacataagtcaataacattataaataatagttgctttgtcatgacaccttattaaggaagaaacaaaagatgcttttttgcagactttgtgaagaaataatatatcctcagattctcctacttaattggaaataatgaagctttttataaggccaaacattctctatggctcctaaaattctgtctgggcaaataatgttatgacttgtctattttatcatgaaggtaagattgtcttcttgagtatctttcatattaattgagggtaaagttctttccttgtagtacaaatcatgggtaaaattaatctttcttagaactttatttcagagcccatctttctttcttttgatgtttttctacaatgcttagtgccattttgcagcccccaagctaggaaatcaatgatttgttggccagtctttctgataaattaatttctgctaaagtagttatgactaaaaacagctataaattactgttcccagtaaatatatttgcttgtttacatgtaacaaaaatccaaagtcatgcctaatattagaggctccagacttaaaaatagagttgtacaagaagaatttggggcaaaaataactttatcagtaaaatctaatgtgacccaagtggatggcagtgctatgacctggaatttctggagcagctactgctttaaatattccattacactggcagattcagggttaaataaataaatatttaacaagttaaataaatgttttgatccatagttctgaaaatatggtcactatcctctcttgtagaaagggccttttgtcttcctcctgtagagtttctaagtccatcctcaggaagggaatttcatagaatttgaggctcattcaccaatactgtcaacaacacttgactgggtatctttgacaataagttctcagtttcccacctatttaacatctaaaagtacagatagccagctgggcacggtgggtggctcaagcctgtaatcccagcactttgggaggctgaggcaggcggatcatgaggtcaggagttcgagaccagcctggccaacatggtgaaaccccgtctctaccaaaaatacaaaaattagccgggcatggtggtgcacgctgtaatcccagctattcagcaggctgaggcaggagaattgcttgaacccgggaggcagaagttgcagtgagctgagatcacatcattgcactccagctctgggtaacagagaaagactctgtctttgggtggcggggcggtggggggtttggtgagaggggcgggaaaaatacaggtagtcctccccatccatgggttcattatccatagatttagccaactgcagataagaagtatttggggaaaaaaataaatgattgcatctgtcctaaatatgtacagactttttgcttctcattattccctaaacaatatagtataacaactagttacatagcatttacattgcattaggtataagttatctgcagatggtttaaaatatatagcagaacattatatgccaatactatacaaggatttgagcacatgtggattttagtatccaccgagggtcctcgaaccaatccccgatgaacactgagaaactactgtatatgtaagtagattgagctggtgaattggcagatgctgtggtaattctgcagactaaagtattagtaactgatcaactagcctgagcatttttccatcgagaatggtgacattattttctaagccaaatttagccaactaccaggataagaggtgggcttataaataactgtaggttcagcaaacaggtccaccgttgtaaactaaatggccaaagtcaaagatatatgatagcaaaagatcttttggttgattgcaccttaataattttagagtaatcattaatgctatattgcctcctgagtcattgccttcagaaataagacaccaatatactattcagtccaatttccagtcctccagcctacaaaaatagactcagtacatagaataaaatggctcacaattaaggatttagacaattcacagggatcacagacaacagcttgactccttaaaaacatcttattgattaagctaaatggagtccagtatttgccacatgaacatgtgtgtgtgactgtgaaggaacaagttaggtcaaatgtctaatggcagaagacggctatgtgaggaatagctctaaactaaactaattcgttcatcacagggaaatttagttctggttttctatctgtacttggcttatctccaaatgataatttcaagtcagagaaatttagaaaacgaatgtggaattggttttcccacttgtttgtaagaaaagatatgtaaacagtttcttgcttattctagcacaaggaaagcctagatcagataaaactattgatattcttagaatttatgggtttttcttacagaatcgctagaggacttaatgaactgcaccaaaatagtttccagtcttacttcaagggcatacggttttgaactatttttcagaaaagatttctgtaaagctttatgtataaaagaaaatttgttttaacattttcaagtaattttaagcataactaggtttatcaggacattctcaagcccatcaagtttagaagataatatcaagaaagataaacaagataaccttatatattaataggataggtagaaatctttttcctatgcgtcaaagcaaaaatcaaaacattgactaaaataaattttaagacacatcttgctgttatgtcttatctatctactctcaagaacaaaatgcttatttaaaaacattcttagtctgcagggctgctgcaactaatttcaccctccatccactagtttcagacaaaagtatttgttgcaagtttcttgaatttatgcaatattattatttttgagatggagtctcattctgttggccaggttggagtgcagtggcgggatctcggctcactgcaagctctgcctcccgggttcatgccattctcccacctcagcctccctagtagctggaactacaggcacccgtcaccacgcccagctaatttttttgtattttttagtagagacggtgtttcaccgtgttagccaggatggtctccatgtcctgacctcatgatccacccgcctcaggctcccaaagtgctgggattacaggtgtgagccaccgtgcctggccaataatattattttttaatggacaggcaacataaacttctataaagtaaatcactgtctttcaaattcatttgtaccattgtcactggatattgtgtcagcaaggaacataacctgcatggaatttttagtaaaaatatctctgattgttgaagttcaagaaggcactacaataaattacaataaattaatgccctgtagagttgatatttgttaaagctttgtggtaataacatacctataagtttagattttcaataaaactctttttttttttagcagtgccagcctattctatattaagaagatgcttctttctgactcactgcaaagagaatttacacttgaagagtcatttttaagagtgtcaggaatatatctgcactcatctctgctgtttcctctcctgattctccagtgactaagggtgatattaaacacattgaacaacaactagcacgacatctgctgatcaatcaaaataaaccacactggtgtgttccggctgcatatcagctgggccaagggtctgatgtcaacctattataaaagaaagcagagcaaactggcctatttggaaatcagatgcattctaactttcaagtcaatctacttgattctaacactttaatgtatcataataacatgaggattatttctattcttctaaaatggaaaatgttaatataaagtcttttctgaaatgtttcttcaaattctataaaatttggccaaataacaagatcaaaacatttaacattaaaaatcatgaatatttgggcaacggtccctcctacactataatctgtaggttggttacccatccaaacaagtttaggaccacagtccaaacaaaggacaggaaggataagaaccacagaactagaagaaaagccatcccataactctgagatggctgcagggaggaggagaagggtgtcatattaatcagggtggggtctgagataataagggtgccacttcgagaactgagcaaagttcatgaataaaacacaacatatagatatagtttttcaatatatcaatatcttctgagggatataactgtgggaagagacagtgaattagccaatcaccctgacaaatgattatgagttaaaatttctaaggaggtctgtggtgcaaataatcctaaaaattttcactaaatggaagatctgtgagggttaaagttgaaggcaatcccagtacagacagaaaatttactgaattttcacttcatgaactaacgtacttttcattttgagttacttttatctcttctttctttctttctttctttcttttcttttcttttttttttttttttttgatacagtcttgctctgtcgcccactggagtgcagtggcaccatctcgtctcactgcaaaaactccacctcccggtttcaagtgattctcctacctcaccctcccgagtagctgggattgcaggcattagccaccacacctgggtaatttttgtatttttagtagaaatggggtttcaccatgttggccagactggtctcaaactcctgacctcaaatgatgtgcataccttggcctcccaaagtgctgggattataggtgtgaaccactgtgcctggccaaatttaggtctacttcttacaaaatagatccctgagatactgagaatctactatgttgcagcatcctaaataaatgagctgatctgcttcttttgtcctacaaatttcacatgtttattttccagcctgcctttctaccagttttcgctggttgggtgtctttatgtgtgggtgttgctgtgaaaatggaggtatagggagggagttggctctttcaggtttaataaagtttttcatcatcaacactagaaatatgacatcaggtttcctttagaatctgatgtgtcgacttttactaacaatttggccaaagcttcttatgtattaggctacttttctctaagacgtattagcatcacaatgcccactcacatggcctgatgtatttgtctaagtgtagggtaaaaatccatttaggacctgtcgcagtggctcatgcctgtaatcccagcactttgggaggccgaggtgggaggatcatctgaggtcaggagtttggaaccagcctggccaacatggtgaaaccccgtgtctactaaaaatacaaaaattaccccggtgtggtggctaatgcctgtaatcccagccactcaggagactgaggcaggggaatcacttaaacccaggagacagaggttgtagtgagccaagatcacgccactgcactccagcctgggcgataagtgagactccatctcaaaaaaaaaaaaaataaaataaaatctatttaggaagaaaatacgtcccttcggatacctctagctaagcaataatgaatataataaaaggatcattgcaacagaaaaaaaaaagaaaattgtgaaataagttaataccgtctcgtttttagcctcaccttgtttttcctagtctgttcccagggccctgagtcgctggttggaccccctgactgccccctggaatatgtttgtcttgtctttgctctagccttttgcatattgctacaaggttatccaagtgtacttttcaccagttccattcccacagaacagaaccctcctttctgttaacctgctattctaattgttgtaaatatgttaattggccaaaatataatattaattttgagataacataccatcaatccttttgattcactaatcatgtatttgcaaatctgcctgcttaataacatttatttgtgaccccagaatcaataccatggtgcttttgtagtcatttgcaggcatatacagagtggtaaaagtttgagtcatccaacttgcatattctcagctgaggtcaaacaagttggtgctgtacattcttgttttagctctcatattgtaaacaagtgtccttttcatgatttatttaatgtttttcacatttttgtcctttcgagtggtggtttctctgtttaaaatgtcccccatggtcagcgcttgagggactgtctaatgttcctaaaggcaagcaggctatatgtgccttaaggagaagatacatagataagtttcgttcaggcatgagttatagtgctgttgacgatgagttcagtgttaacaaatcaactatatattatataagatatctttaaatgaaagcacatagaaaacaaggttctgttttgctcagttgatgaaaatactggtggctagaggctcgcaggagcctaatcccatttcctctaataacaatggcttggtattcactaattcagtgtttgtagcaactttatagaatgtataactcctgtgaataacaagaatgaactctatttatctcctcccatgaaataattttcaatcatttaggaatagagataaaaatgcaatcaaatacgtaaaagaagaataaaaaacaagcaagaaccaagccaagtctagaagtagagagagttaaagtagttgaaccagagaacctttgatacctaccacatttgagccaaaaaactgacctctgagcttccaggcaatagaggccaaaaaagaaggcaatgaatatcataagcttttcttataaggctaaagcaaatatatcagatttttgggagagacacatttttgttttctatcagtaaattctaagagtaactttatgccacaaagcacataatggcaatgtttctcattgtagttttataaataaaatagaaatggacttcacatgactttttgtttgtttgtttgtttgttttgagacagagtctccctctgtcacctgggctggagtgcagaggtgtgatctcggctcactgcaaactccacctcctgggttcgagcgattctcctgcctcagcctcccaagtagctgggattataggtgcccgccaccacacatggctaatttttgtatttttactagagacagggtttcactatgttggccaggctggtcttgaactcctgacctcaagtgatccgcccacctcagcctcccaaagtgctgggattacaggagtgagtcaccatgcccggccatgactgctttttaaattgacaataatgaagctcaaggcactgatgctatttttgttgccctatgaacacattcctacagggatctgaagttttgtatgtttctggggctctgacataaaatacgtttctactgcacatgtgaaattatcctaatgatggaaatacccagttctctggtaaactggaaggggagatatgtttcagtgagctgctgtgttggtacctctaaaaccattccaaaaagaagacatctgcatttgcctacaaattgaagagtcaacatagggcagtccagaaaaatgagaatagtctccaacccattatagactatcccaattaggaatatgatgttagttagaagtgttgtgttaattatgacgttagatgtatctgaaactcccttctccaagtccttgactcttttaaatacctatgctcattttaatttgttaatttatcttactactgatgttaaaattttctgatattatgtggagaaacatactaaatgtaggttcaaatagtgagtaaacaaacgttcagaaaaaaacagaagactgagtaaaagcttatcaactcatttaaacctccccacatattttatggattggctgttgatgcccaaattttttagcttaatttgtcctgattttccaaacatggttattaacacatttgggactcgtttaaaaaaagaaagaaagaaaaaaaaaacttcagccaaattaaatttaaaggagtttaattgagcaatgaacaattcacaaatcccttaggcccagaatcacgcagattcagacactccagtgcagccacatggtggaagaaaatttatggacagcaaaaggaaagtgatgttcagaaaacggaagtgaggtacagaaacaactggattggttacaagctctgtgtttgccttatttgaacaacgatttgaacagttggctacatttgattggccaaactcagtgactggcacaggtgtgggatatggtcggtttacacctccacttgtatagttcatgatgtacagagaaacctttaggctgaacttaaatatataatgaggcagctttaggctaaacttgatttaacagacctttaggaatacacattctggaagagtgaatttataaaaataaatgtttatggctgtctcataactgcattatcagcaatttttgcactatagagatttttatgttaggtcttggtcctttatatcattaaaatattaaataggaaaaatcatggaatttattcataaatagatgtacatctatttccccagactacaggtaaagaactatttgggtaagaatgggctgctgacctgcaaggagaaaaatgagagcttcagtttaaaactgtcatagtttataaaagatataaaccattcagttcctttagtttttaatatttagaagagtaaacaaaaatttgattcaattaaatgtaacaaatacaattaaatggagatgcaatttgatttattgaaaataacatgattttaatgcagattaactgtaggcagtaccttaccagaatataatgcattctggaaaatatctactgactcaaacatgtaaaaccataaaaagatttcatggtatggcggggagaggggataggaggggtgtctgttcccagggagctaaaagtaatgtaaactctttaattacttgctgcttttagacataatctttgatgacatagatctagcatgttatacatattctttcattttgttctttcaaaaaaagtatcactttgattagaaataaataagaaatagaatattcaaataatggctcaaacactgcaatagaaagacaatgatatggacaaatggagccatcaccaggccagcagaacgtctgggatttcattttagatgttgagtcctgagctgatttttcaaagcatggatttggcattgtaatgctgccagctcagaaacgtcgatgtaatgggagaaaatgtatggggaattcagggcctgcctgaacctccatgggcccagccttggtacactcgggctagagagatctgtgaagggctgtttcacctcctggtgaccactcccacaccgacattggttggagatcctgccaactatccagggagcctgtggatctctttccaatgggatgctagcttttagtcaactgtttaaaaaattattatctttaacagctcttgaaagattagctttctattgccatttccaaatcttctttcctcccactctgcaccagcacctgcactataaagaaggtaaattggccaggagcggtggctcatgcctgtaatcccagcgctttgggaggccgagggagcgtggatcacttgaggtgaggagttcgagaccagcctgcccaacttcgtgaaaccactgtctctactaaaaaatataaaaattagccagacgtggtggcatgcttctgtaattccagctactcagaaggctgaggcaggaaaatctcttgaacccaggaggtggaggttgcagtgagctgagatagttccactgcactccagcctgggcgacagagccagactctgtctcaaaacaaacaaacaaaaagaaggtaaatcactaggggatatatagaaattatatgataaaatagactttagaaaaaacctttttgaaaccatttacaaaaggaaactgaatagacctctgacactcttgtctccaataagctgtgaaaatagtactggttccatcacttaagaggcattcagctgttctctggtaaatatttactcatacctttaaaaggaaaaattagctaaaggtaggctcgagttagaaacttaatctaactagttaaatcctttgaaatttggcaaaattcctcttcacacataaaccacttaatacaaaaccatgttttgtattaagacccccaaatctgaagggcaattagccaactcctagatcatctcatgttatatcctgtccaaaaataaacaaactgggctctggcatattctaaaaatatcttcctgtctaaaaaaacatttaacagagtttgtctaagaagcagactcccaattttattctaaatataattatatttgcatatatgtaatttacaaacaactttcctggaacacaagcattacacaaagtgaagtatacctgtatatttatttaaaagcaaacaaacaggatatatatatatatatatatatatatacatacatacatatgtttagtttttttcttgagacagagtctcactctgtcacccagcctggagtgcaatggtgcaatctcggctcactgcatcctctgcctcccaggttcaagtgattctctcagcctcccaaatagctgggactacaggtgtatgccagcatgcccagctatgttttgtatgttcagtagagatggcgtttcaccatgttggtcaggctggtctcaaactcctgcctcaggtgatccacctatcctggcctcccaaagtgttgggattgcaggcgtgagccaccgtgcctggcttcagaatgtatttttttgccagtgtgtcatgtttcatagctcggtgactgatgaagggacttattcagtgcttttcctttatgcactgatatttattttattaattttaaattaataaaatattaatttaaatatttttaaaattattaaaaatattaattttctgactctttaggaatacatattcctaaagagagtgttgtgttgtgttgtatttaaaagaaaagggctgtggattttgacagaccttcaaacctcaggcctcctactcattagctgtgtggtcttgggcaaattattcaccctgtctgagtttaagccttttaatttgcaaaacctctgaggattattttgaagattcaattaactaatatatgaaagtgcaatgcaacaggaggttgctaatattaatttgagttatagtccggcaactcaacaagtgtttgttaatattctatatatatctacactgagaaaatcagactgtaatagcaccaaatatttgggcaaacttctattggtttggtttgctaagtgcatcacatgtattattcattttgtctctctatattgatttttagctcctgttagaaattgcttatttttcaactttataatagtgtttgttttaaaaatatgtaatatgtttatgtgattcaaaattcaaaaagcaccaaagtgtacagtagaaacatatttttcctccttgtctcctgccatagttcatctacccagaagcaaacctgcaaaatctatcttatgcatataaaaacatttaggcgcaaatataattcttttccctttttttgcacaagaattagcatactatttagggttgccaaatgaaatacaggacatcagttaaatgagcagtatttgggacatatttacactaaaaaattaattggtgtttcatctgaaattcaaattaaactgggtgtcctgaattttattggctaaacctggcatcagtaaattattatccaccctattctgcatcttgtttgtctgcttttttttcttttttttctgcattggaatcatctaaaactctgttaaaactcccaggcccaagctacacactccaaaccaatttcatcagaatctccaaggatcattcttgggcaacagtatttttttctgtgattgtgttaaattgaggaataatttaacaaaaaaagcacccattttaagtgtaccattcaatgagttcaatgacaaatctatacacctctttttacttaataattattttggtgatcacccaaaaatcagttcttaaattgtaaaccctttagagcaagctttgtattttatgctacttttcttcacaggacttgagcattctgtgtttcagataaatacaggttgactaacaacagagttctttatttcagtcattatttaggtttaatgcacaaaatgagaaatgttattaatgagtttttgcagttgcaacacttgttacaaagaaatgcaaaggttgcgaagaaatagttgcagacactacttagtaccaagagatcatttccacctactcaagatctccccactggctaagtggtacgccaggtgcttcacatacactggatgaccctacaaatccctacttatataggagggatctgaggcccaggttaaagaaattgttcaagccacatagctaatattgagaggagctaggattcaaaccacatgtttaaccccaaattcttagtaaggatacttctcaatatggcataattttgagattccacctttcttcacactattcagaaactcctatttttaatttggaaaatggttgagaacagctgtttctgtttctcagcagatgcttatctcagccaaaatgccttcttgagagaaccaatcaagagaaaccaaacaggtcaaatttctttaggctcaagtttctttgatctgtattaaagcctttacaaggtagttctggattttgtgtttgttggttcacatgccttggatcacctgagcatgaaggcttattgaaagaaatagttgaaaggatataattataagttgtgatttcaggggaaaggaagtagtgtcttttgctaatgaaccttattgttcccctcaagttgtgtgtatatcatatccatgtcttgatgtgccactaaaaatgaaagaattgacttaaaacactaagggtgaatatcttgtttctgcatatgccaactatcttgtttctcttcctttatggatgtgtgttttgaaatgcaggatgtagacacagaccacaaaaccattctagtttctgcagcggagaacgcaatatgagtatctgtctcaaggtcatttcctgataatattatcttccagtaatttgaggcataggttcagggaggagagtaggacggaattctattcctggcttagctgttttcctctgtctccatctttaaagcaattttgaaagtctcttgcatatggttgatgttcagtaaaggttggatgaactgtcttgacgttctttttgaaaactgaggatatgctgtgttccgagtaacttggcaatgtgtcagtgagggcacaattatgagtcagagaccatagaactgcaatgggatcttaaattcttttaattttggcaatctcaattcatctagaagcacctttagaagagcaattgatcttgaaatcttaacattcatcaataagtagatgagaaagaagtttataaagtcattgaatttcagagagaacttgatgcctggcagtctatggcaagttgtggacttgctttatgtatatatatatatatccatgaaaccacaatttgattgattccagtagttttgacttgggtcttggcccagaattcaaaagataatgctgtgacagcaacaaggaaattgtaagtatagttttctctaagtactgtgaaaggagaaatggaaactaggttaactacttagtgttttgctaatcctattaatcggtatgaagtttcttgattctgtcttttttggaagtatcacaatcatgcatgctttacatacagtggggttttttaatgggtattactgttagtaattcccttcatccacttttgggtggactacctgttataagcttggaatgatgtgtagcttttgttagtttagaaaattcctttttttccagcctagacctttcattatctcacatctaatgttttttcacctcacattatcctctttcttccaccctctatcatttgtatttttttgtgtagctttttgcctgtggcttcttttacatctagaatccagtaatgccaatatgtctttataacttccagatgaacaatttaatattcctcctttactccccaccatttactgcatcttgtttcaacacataactttagttttagggattagtgaaagtacagattattgtatattcaattaaatgccaccggtaaggggcagagaggtttcttccaggttaattatttacattcgtctttagaatctcaagagttcaacaaacgtgggctgagaccagttaaaatacagatatttagaaattgttacaatatctttagagtcagccaggaacaaaattgtcagaaagggaagacaggggcttgacttcagatcctcccacccatccacatacacactttttcgttcttaagtgtctctccgtgttcctattgactttattctagtaagcttctagttctccactttcccatttaggattttcattggtagaaatatgtcccattccaactctttctttgtgtcttttccgttaaccattcaacaaatatgttgtgcctctttttaccagctactctgcaaatcaatgaaaggcttagtttaggtggttgtgggagtaatgagattaaacataacctttattttaaaaacatgtagagattaaaaaaataattaagtgtgaaatttcctaacccaccatttagatctctataatacaggttctgagaactcaacatagctgaaatttgtccgcaagcagacctactttcagagtccagtcccttacagaacgattaattcatcagctgctgaagaatcaagtccaaataaaattaatggtaccacacaagcttcatcctttagtttacatataatgtgagttatttatatcctttaatgataatgttctcttgaattttcctgaaacactagccatatttatccatttaaaacagtggtccccaaacttttgacaccagggacgggtttcatgactattttttcacagactgggattgggggatggtttcgggatgattcaaatgcattacatttgttgtacaccttatttttattattattaccttgtaatatataatgaaataattgtacaactcactataatgtagaatcagtgggagccctgagcttgttttcccgcaactggactgtcccatctgggggtgatgggagacagtgacagatcatcaggcattagattctcataagaagcgtgcaacccagatcccttgcatgtgcagttcacaatagaattcatgctcctgtgagaatctaatgctgctgctgatctgacaggaggtggagctcagacggtaatttgagccatggggagcagatgtaaatacagatgaagctttgcttcctcactggctgctcacctcctgctgtgcagcccagttcctaacaggccactgaccaatgggaccatgccaagggtccatggcatgagggttggggacccctgatttaacatgattcttgccttcatttaaagtacaaattatttgtattatataatatatatcatcaaagggtggtgtccaaggtgttctgttgctccattagcagccttggatacaagatagaagtaagcatttgagccaatgattctcttgagtggagttccctcttcagtagtcttacccttgagcacctaaataagacccgttccagtacctcattaaaatccccaacacatatttttgctgagcatggttctgaaaaccacagaagcaaaagtaggtgttcagtaatttactgtcttaaatgcagctattgatagggttcagtatactattgaaaagtatatactcattcatcagggtcccttaattctatagctttatatttgtgagttttagactgggttcttctttagattcaacatacaaggtacctttgagtaaagatgctttttcttatataaagtgcagtattcagttttctaatatgtacaccctgaagttctccaagaccagtcatctttattatacaaccacactgaattagatccaacagggcatatattagtgttgtcagcaacatttgttgaacacttattttgagctagaccctaaagtaaacacaagacgtgcaaagcttctgccttcctagagcttgcaccctagtgggaaaagcaagtgataatgaacaagaagacagacgtcagctggggagaaaggctataaaaaagaattaaaatatggggaacccacagaaaatgaatgggagccttctttagattcagggttctgcaagatctctctgtagaagaaaaatttcagctgagaactgaatgacaattagaagtcagcttatgaaagtcggggaggaggaaaaattcaggtagagagaactgcagtgcaaaggccctggggcagggtgaaacttggttccttcaaggaatataacaaagagggcaaagagtattagtagagaactagccagagccagatcatgcaacatttcgtaagccagacaagtggctttaggttctattttcagtttgataggaagccactggaaaatattaagcagaacagtaatgtggtctgacttagatttttaaaagataattctgcttgttatgtggagaatggatggggcaaaactgggagcatggagacaagttaggaggctcttattagttgcagtgaccatgcagtttatccaaagcagggcctttcagagagtgaaagtgggtgccactaacagaacagggaatgtcaactgggcctgtgctgagcagaccagggcatgtggccatttcagctgttacagtggtcttgctggagagagagctgtggagccttttaggatgtttcatgtaatcttcacaataaactctgtgcccaatgcatattagcacctgataaatgtttgctgggtgagttaatgagtaaatcagttaatctgggggaagattagtatctttgtttcgtaaaagaaactatgctacaagcatattgtgaactctaattccaatgataaaacccacactctttctttaatttcttacctaagatgtcataattgttgcttttcaaatgtttttaaactactgtacatgcatttccattttcttccttcattttcttccctctcttgggtttagggatctacatgcaaaggtttcataaatgtgtttgctgtactcatttttatcaaagtcaggaaccagagagaccattaacgatatacagttcccaggaaactttttgatctttctttttgaagcatcctgttccacatttaatgcccaacctcataaggtctccacctgggtactctgtcagaattcatttaacaagtctaatggtatgtgctgtcttacctacccactcacaccttttacaaaaaactctctcctctgttctcttctgcccatccgggaaataattccaccttacttccaggtaaagagacctacgaatcatttccatcatattcaccacaccctttagaggtacagtagcttttgcatgttggataactttcatcaaattatcaataaaaaagagcatctcactctcctactttgaattatgaatattaaaaaatttcaaatttgtatgatttatacaatttgtattgtaaattctatatatttctggcttactccataaacattcaaaataggcatatcttctgacatgatcaggttaaatagaagcctggcatataaatagaagatgtgcatgcacgagcttaatgatgggtgcatgcttgatgtgactgtgtatattgtgtatgctcacgtgttcatgtgtgtgcattcatgtgtgcacatgtgggcaggcatgcagacgcaatgtgcacatgctctcattatgaccctgctcatcctctataatccataaacctgatatagcccagtaaatgcagttatgcttcagaaaaaaatgttgcagcttgcatccttatactcattcctcctattttatcctatttagattgcttaagaaaatataaacctatataccatgagataaaggatattcaacaagagcatcttctctttagttagatttataaaactagtttccattttagatcccagggaaaatcagctctttcagatgatgttggaagattttaaagtttacaacatcatagtcccaacctttgcttgattaggaggaagctaatggaccttatattagcctgtattcgtcatcgtgtaaatatgaactagttgattaactaccgagtaatattatcagagaaggacagtgctaacattctcctaaaatataaactctctcatagtcacatacaatgatatattcaatttaatgtattcatagagcaaatgtgaagcatttctattttgttatcctatgcgttagaatttatatgcttgaaatttaatatgtaagcatttagttttcataattatgccttttgttgtaagaataacacctaccaaaatgggctcagcttccagcaggaaaactgtttttttttttttttttttttttttgagacggagtctcgctctgtctcccaggctggagtgcagtggtgcgatctcggctcactgcaagctccacctcccgtgttcacgccattctcctgctcagcctcccgagtagctgggactacaggtgcctgccagtacgcccggctaattttttctttttttatatatttttagtagagacgggtttcaccgtgttagccaggatggtctcgatctcctgacctcgtgatccctcctaaagtggtgggattacaggcgtgagccactgtgcccagccaggaaaactcttgagtttagctattaaaaatccccttctctctgctccactgcttgcagtttaggttattggaaacttataaaataaaatttggatttggattttcctttttaaaaattagcagaaacgagttaggaagagcattctttgacactggaggagtagaatgattctcaagaatttgagactggaccgtcaataaactggaagtgtcagatacggcaaatctattctttgtgaatgacagctttttgtgatcttttttccactaaaatgttaacatttaccttttagtgtttgacttaatgtagtaagttatatgtgtctttttgttcaaaaatatgagaaactaacacgtcactttttaatggaaattgccatattttttcctggccaggagtaggcttcagggcagtgactttgcagagatgagatgtaacataccccagtctgtgtcctttccgagtgccacaaactccttgtagatcaaatctggaaaatacaggcaaagctatttcataacaactgtcttataacaaatcttaatgtgtaagaactacaattcttgatgtttattttactttattgctgaatttgtgattctttttcaggaagaacagtcactgtgaatatgagtagtcaacaggatatgtttccatatgaaggtccctgtcccaacttaatgaaaagttgagcaaaagtataatgcaaaattctaagtagcaacctttttataagtgtaatttcatcaaaccatccactttcaaatatttcataacttttatcagccaaaaatttcaattaaccaaaaaaaaaaaaaaatcacctattcgaaagctaaagaatattgtagaattgggaatggcactctctgttgtcagaaccttagcaggctctgaatgaggcaccaagaatctgccttctgctctgttctgattaaactttaaaatgcaccaaacagcaggaaaggtggtcatagctgtaaatgtctttgtgctaatgatgacttttctcactagtaacagctggggagtgaaactcgacaaagacaaaattataaatgttttatatcggaaaacactaggtgagtttgaaacgtggtcaatcgattaggttactgccaagaagtaaacaatagactcattaaagctgtaattagccattgttgacatattgtatttttaatcagagctccagtaggggatgaagtggctgaaatcatctagtgaaataatctagggctttgtgaagtagaagtaaaaccagattttaaaaactcagccatgcctttcccttgggatttctataccacctttgttctgatgaagttggtgacttcaattaggctagtaagtagcctataataattgattaattgttttgtgtttttgttacattgggtacttgtcaaaagggttttgtggctccctattatttggcatatcaagagtagagaggaattcatggtgaattcctcttcaaggcagggagccaggtatgttacatactcgcgactgcagataaacatcctaagaatcaagggttaagtactttttcctgtagttggtaaatggctaaaattgagcttctgaactcagggctgtggattccaatgcctgcctctttccatgataccattgacaacaatgatcctttggatcccacctcatctgccacggccccctaaagcttctgcttccatctaagccgaatctcctgtaaccaatgacactcgtgcacattctacctccagaaccaccactctcctcattccagctctccctctctcctttccctatcaaactccagctttcatctcatctcctccatgaagccctcctgattatttctgcccaccccaccaaacatccctttatgagtttttcctctctcctctgaactcctctgtcagatttacagccctagattttctgaggtagaactcattccaaataagttagcggatgaagaaacattttccccaataacataagagttaagaatcatatgtaattgccttccttattttctgttcagcttcaaatcatgcacatcacagaaggaaagttccaagtcagagatttttatttctataggcatctatgtagggtagaaagagcctggtgaaacaaacaagcaccttctttggactaattccatgctctgtagatataatctccattttccagtatttattaaattcataaaatgcttcttgtaaaatatccgctaaaacaatgaatagccaacattctttttctaaagagatcttggcttttccttggaatcacatggctctgtgagttatctagaattatatttaagtgagaaatttttaataaaatgacacatcttattttcatagatatttgcctatgaacccatagatgctatctaattcaacttccccacatctcagggaggcagaacttgtgggcagatattttgattagtttgccctttctcagataataaagcaaagcagtggaactttggcacgacttcctcaaagcagcagccagctagaaaatgaacccaatttgcaagtaataggccaatgtcagaaaacttagtaaatcattttattaaacaagccatatctttaatttaaaaccaaatctttttctttatggagacattgtttaggagtagaaacttcaatttgcatatatacatttaatatcctttcatatatcacataactctacagagaaaagggatggattatctgcttcactgagggtggcatatcattttcatgataagggcaatgaatcgtgctgtgactggtgctgtttagcccattgaatcaggcgcctatggtgggaaaggaatcatcttcctaactaagcactgtcttaggaaaagatatgtctttatgagtgtggtctactcttctagtagctgtagagtgagacttaggaatcattcattggcagtgaggagtttctgggctaagaggtagggcagtgcttcttaaccctggctacatgttggaatcattagggagagtgttaaaaggtacacatgcttttgtcatatcagaattcagatttacaatacttaaattggtgtatggcctgggcactggggagtttttaaagcagccaagtttgagaaccactgagttaggaaaacccattttcctgtcttggtgactgatctcaaggaaggcattggcctctttgtgtgtatttcctagtctgctcaatggacattggttctgcttcatcgcatcacaagtgttttcagtcttagaagagacatatgtgaaagattctttcaatatacagctttacagaatttcaagcaatttacatttatttttcttgttccctagctggagtcctggcagaaaggatctaggaaagcatttaaagaaaaaaaaaaaagcatgactgccttagaaaaattgagtcatgcaccaacttaagaagacaagcagaaaaatttttgaaatcaaatgataaatctttccaaaaattcttgaagtgagtttatttaatccaaacatttatataacatctcagcgcatctgttttgagtgagtaaaattataatattttgggggctacttctaattttcagggaaatttagaatgtgtgagggaacaaaatcgaatgtagtggggaaagcatattaaggacatttataacagttttcagcagaaggagaaatccgcaagctatgtgccaagctttgctgacagccatcagtaaggagaaatcactcttaactgccacagcatcaaattattaatagataaatgggctcctttcttgaccaatgggttttctacactggaattgggtgctgaaggggtttacagagtctcgagattctggaatagtggatgaggatggagaaaaatggttttcagacctggctgctcttctgctgattcctactggaatacttaagcttccgcttgtccaagacctacctgcctgaagacactctgtttcagcttatccagagagtccctcgagttggtatttgtaaacttcacagggaatactgatgatccccagtgtgggacccactggattatatacacactccagttctgatccaggattgcttggcggtgcctggatcaccaacctgcgctgctgtttctcaatgattttcaattactcagtcctgatctgtgagcacatgtgcacagaagattggctgttggaactttgtcaaataacaaacatttctataaatcataaattactttatttgtgagaaattatttctgagaattattttttagtcaagattgttttggctattctgtgtccctttcatttccatagagtttttaagatcagctagtgatttttgcaaaaaggcaaccagattttgaggaggaataagttgaatgtgtagtgttgtggcattgttttaaagattaaatgtgttaatcattagtatttagtgcttagactaaatgataatagactcagatgataatagaataatgataaaacagtacctgattaagtatatatgtgattaaatacatagattattaaaggtacatatgattgaatatatacaactatatcaggccctattgtatcattttctattatcatttgaattgtctcaaatattcttttctaatttttgatagaaatgtattttatggcctatagataaaatgtattctataggcaatttccatttggtttcaggagggtattattgtttgaatatgcatgatacttactagtaagttactgcaatgcaaacaagcattgtggaggtaggcctgaataattattgtaagagaaaatataatattcttatcttgttggggtttttaataacagctttattgaaatataattcatgtatcataaaatctacccttttaaagagtacagttcagtgtttttttagaatatgcacaaagttgtgccaccattactatttaaatccagaacacgttcacccttccccacagaaacccgtatacattggcagtcattccccaatcctcctctcaccagccgctggcaaaagcgcctatacactatgtctatatggatttatctattctgggtatttcatataagtagaatcataaaaaatttggccttttgcatctgattttgttactttaacataatgttttcaaggtttatccatattgttgtatgtataagcacttcattcctttctgtgaagaataacattgaattgtacatacatgccacattttgtttacacattcagtggatggacatttggtttgtttataatttggggctattatgaataatgctgctatgagcattcatgtacaaatctttgagtgaatatatgttttcatttcttttgtgtctagacccagaagtggaattattggatcatgcattaaatctatgtttaaagttttggagaattgccaaactgttttccaaagtggctgctccatttacattcccaccagcaatataggagggttgcaactttccacatcctcaccaacacttgttactgtccatctctttatacccatccttctgggtgtaaagtggtatctcattgcagttttgacccatacttttctaataactaatgctgttttgtcttcttttcacgtaccatttatatgtagtctttgagaagatatctcttcaaagcctttgctcatttttaaagtttggttatttgtctttttatcaagctataagagttctttatgtagtctggatataagttccttatcagatatatgatttgcaggtattttcacccagcctaggggttgtattttcctttttttcatggtgtctattgaagcacaaaagtttttatttttttttctttttttgagtctaagaaatcattacctaatccagagttatgaagacttactcttatattttcttctaagagtttcatagttttagctcttatatttaggtctatgatccatttaatttaatttttctataaaagcttctttgttgaaaggactattctttttcccatttatttgtcctgccacccttgtcacaattgaccataaatgtaagagtttatttctagattcccagttgtcttccattgatctatttgtctatccttatgccagtgctacactctcttgattactgtaactttgcagtaagttttgaaattgaaaagtataagtcctccaactttattatttttcagtcaagatcattttggctattctgtgtccctttcattttcatatgaattttaggatcagcttgtgatttttgtgaaaaggcaagtagattttgagagggattaaattaaatgtgtagtgttgtggcattgttttaaagactaaatgtgttaattattagtgtttagtgcttagactaaaagataatagactcagatgataatagaataatgatagaacagtacctgattaaatatgtgttatatatgattaaatatatatatgattaaatacatgcaaatacatcaggcactgttttatcattattctactatcatttgagttgcctcaaatattcctaattttttatatttttgttaattttactgcaatggccttttgtgtgtgtgtgtgtgtgtgtgtgtgtgtgtgtgtgtcctttttctcttcatagttacaatttgctttgtttgataaaaacttactagatttatgtggaaactatgttagttggtacctaagaattgccaaggtatacctgtctggggaaataaccatgaaattctataccataatgttgtaaagaactatctatgaagtttccagttaccctttatggatttcatgaggcctttaacctaagagtaatctcttaaggtgcactattccaaccataaaagagttattcttcttttggcttaataagctgtaaattggacaaggagccaaattttccccttccttgtcatcaatgtgagctgaaggttggtatgtggatatgaagcagaagttctttgatccatttgctatttgattttaagacaagttagcatccacacgtcttcttttgaagaatttggagggaaatgccaaaactacaccttagagttaaataagctaatgttaaatgttcataactttgtttcagtggatacagaaatactgaaaatgaatatgcaataaacacttcaactataggccagttcactgaaagaccctctcagctgtttatcaggatatataagcaggatgccttcatatggtaattatatggctgtctttcaaaactggaatttataggttggaagtaagttatgcaggatatcagatttgaaatagcagttctgtccatggccctatcctagctgtaacagtagctatgctttaattttctaaactttaaaaaataaagacagatacctcatgctgtattatcaacattctggaaagttttatcagtgagagttttatcaaaaacaaaaaaaaaacagaatcactatgagtgtgttttgagagcccccagctaaattagggttccaatcccagacctgctagcaacactgtcctaaagggaaatgaagagcagctggacttggacttgaatgtttacagtgtgactctcaggggatcctggtgggatccttctcctccccgcctccccgcctccccgcccctgccccccgcgccctgcgctccaatatggggtctcgctctgtagcccaggctggagtgcaatggcgctatatcttctcaccgcaacctccgcttcctggtttcaagcgactctcctgcctcaccctccctagtagctgggattacaggcatgtgccaccacacccggctaatttttctgtatttccagtagagacggggtttcaccatgttgcccaggctggtctcaaactcctggcctcaggtgatccgcccgcttcggcctcccaaagtactgggattactggcgtgacccactgcgcccggcagggatccttcttttacctggcagacagccagatgcctagttgtcctacctgtgacggggaggggaagagagggcaggggtccctcagacaggtaatgtttatgctgacagacactcttgtggctcttgtctgacctgtggccagtttatgcctgactgaccatcattctggcactgggagccaaaccattttttctcctcggtgtcctggagaaaacccgatgtggggcagctcctcgtattttaaatggaagacaccaattcaaggcaccaccataacgggaaacaagttcaaaggtttttatgtacggatcctgggcagggagggtgcgatgagtcagtgaaacagtccttcatccccaagtcacacaaggcaggaatgaagagtcagagaacaaaaagagcaagtagcacgtggcaactagtgtatataaggagtaggttgtgggtcacaccaaagtattgggcaaatgcctgaacagtctctttaaaggaaagagcaggaagtggggagcccactttctttggtttaagtttaaaaacttattttaaccaaaataacaaccaaaaatgagtttttggttaaaataagtgttttattaaaataaaagtgggagaggtgctaagtgggagaggtacctctaaattcttatctctgaccaccagattgagccaattaggtgtggtgttctactactaacgtgcagtcaacaactttggctgtgctattcccattgcagagtggtactgaacaatagcattattaatcagattagaccttatgcaatcgtaggagctggctgggcatatctttgtaagcctgatgctttcttttcttttcttttcttttttttttttttttttttctgagatggagtctcgctctgttgcccagaatggagtgcagtgacgctatctcggctcactgcaacttccgcctcttgggttcaagcgattcttctgcctcagcctcctgagtagctgggattacaggcgcgtgccaccagacccagctaatttttgtattcttagtagagacagggtttcaccatgttggtcaggctggtctcaaactcctgacctcgtgattcgcctgcctcagcctcccaaaatgctgggattacaggcgtgagccaccatgcccggccacctggtgcttttatgtcttatgaacctgaagttagcagaaccaggggcagcaaagaaagatggacatgaagtgggggaagcaagattcagtaggaatccatgagagaaaatgagaacttgcctgcctctctcaccacctcaaacctcagtagtgcaaatgacttaccaaagaaactggtggcttcccgtggaactgcacacacacctagtgatatagtttggagatttgtctccatccaaatctcatgttgaaatgtgttttccaatgctggaggtgaggtctggtgggaggtgtttgggtcacagggttggttccctcatggcttggtgctgtctttgtgacagtgagtgtgttcatacaagattagttcttattttattaaaataaaagtgggagagatgctaagtgggggagatgcctctaaattcttattctggccaccagcttgaactactaaagtgtgatgttctacttctaaggtccagtcaggaaccttggctgtgtcatttaaaagtgtgtggcacctcccccctcactttagctatctcgcttgctcctgcttttgccatatgatgtacctgctccccttttgccttccactatgattgtaatcttcctgaggcctccccagaagccaaacaaatgccagcaccatgcttcctgtaaagcctgcagaaccgtgagtgaattaaaccttttttctttataaagtacccagtctcagatatttctttatagcaatgcaagaaaggcctagtacacctagccctcagcataaccttgggcacactttggcattgcacacatttatcatttatgtttccaaaaaggatgtgacattctaaactctcagtttcgttgttgttgttgttgttgtttgtttgtttgttttttgagacggagtttctgtcatattgcccaggctggagtacaatggcgtgatctcaactcactgcaacctcctctgcctcccgggttcaagtgattctcctgcctcagcctcccaagtagctgagattacagacgtgtgccaccacgcctggcaaatttttgcatttttagtagagacggggtttcaccatgttggcgaggctggtcaccaactaaactctctgtttttattaagaggcattttaggctatcagcatttaaaaatgtttctcaattacttatagcccataaacacaagcccttacaaaggcttatctgaatctgaaacagcaaatttgtgtagtactgttttgttcctcctgatcattttctcatctgaagacaaaagcctaaattgttttaactaaccctgagatttgggtcttgtctgcaaaacagtgttttaaaggatatattaattagggattcactttctatccatggatatatgtgagctttggggataatactagctctttgctttcatgttgttttcagatggaatccattaggagtatctgtcaatattgttctgcatctgggatcaaaatagctttgtgctggtttgggtcctgctgagttgtaatcatttgtagcagggaaatgcatgacaagcattgatctgaatgtatcaatattagtaaacagtgatttaaaaacacattgaattcaggcaaaatgtcttagatcatggaaaagtcctttcccaacactgattataaaacattattgacaagtgtcagagttcccatcaagaatgttccttgagcaaatttgggttttagcaaattcatgtccagattttcaaggttcactagaaattgaccccacagcacttgtcttttagtgggtgtatagaaactggagtaaaactggagaagtgcaagaactcatggacagcagaattgtgggtgtgattaaatttagaagatagagcagtgctgaagaggacattctaagagaaaagtgaatggttggtagaaaataggattaataacctaggttatattattaataaaaataaactcttgaagaaataacactggtgctttgttttccaaagccttccacaaataggttcaaatatatagaattagaaatgtcaagtaggaaataagtatcaaaacagagggaattttaaaaatcatatgaaaatagtttgtacaactccatataagtacatttgaattcctagatgaaatggttaatattctataacatttcagctttacaaaactgacctaagaaaaaacaggattaaatggaccaattaccgaagaaaacagaagataattcagaaaacagtcccagacaaaatcaccaggacaacgtggttttacatagaatttttttctaacatttaaaaatcagataatcccaagaatacatgaactatttcagagcacagaaatgatggaaacattttacgttctatgaagttaatataatgcaaaggtcaaaaccacagattgtttcaaaaacaagacaaattttacttatgaataccaatttttaaaattagataaaatataagaaacagaacccaacagcacattaaaaatgatacatcatgaacaagtaaaatttatttcagaaatgtaaagatgattctacataaggaaatccattaaaatccagctaaggagaaaaatcagaagatcatctcaatagaggaagaaagtgcaattgacaaatttaatatctactcatgttaaaagcagccagcatgttgcttaatgggaaaacactaaaaaaattttcaattaaaatcagaaacaaagaagtctaatcctcactgctactctttaattttataatagaggtattggccagtgaaagtggataagaaaacacaaatagaagcataagaatttgagaggaagacctaaagctctattaaggaaggatatgattgtacatctagaaaattcaaaataataaattgaaaaaccattaaacatatgaaaacatactttgatttgttgtaagtgaaatataggttaaaacatcattaacacatgatttcagacctatctaattcttaaaaagccaacttaacaaccttctgtatagatatacaccatgccaactgtggtaaggttgagagatcttgttctacagatatgtattgaattatttatgaaaaaacattatgatgtcttacatttgcgtcaaaataatctggtaggtggagagttatagggcagatgaaagaagaatggccatatattgataatttagaagctgagtgatcgattatactattctctcaaatttagtatatgtttgaaattttccacaataaaaagtgaaagaatattcatatagtttcaaaagatgcaactaaactaagccaaaggcaaaaatgttatttagagaaaaagtaattttttggttgatgttaatttatatttgcaatttgatctgaaacctttcatatgggcactcatcaattaattctaaatagtctttaagaagagttgaaataaaaattaactgccttcctaatagaacaaaatgctaaaaaaaatacactaaagaagcttccccttccctcagaaacgtgccttctgttctcttggtagtctgcaggtccttagagtactttagccacccatagtttaattctaaccttcaggacataaatgtggttacgggaacgaatatttcatagtcaattagtgggaaccaccctgaggctatcattcagacagtgaagtgcttgctgtgagagttccagatctgaaaatgtacctactaaagcctgacataacccaatccaacaaagataaatgaggaaatattaaacatctgcttatcttgtgcttgacagctttattttactgaaactctgtacacggaatgcaaagaaatatggctgataccttatctgcctaatattttgagctttccgaagtgtcttaagaatactaaattgctgaggcgggaggatcacgaggtcaggagatcgagaccatcctgactaacacggtgaaaccccgtctctactaaaaataccaaaaattggccgggcgtggtggcgggcacctttagtcccagctacttgggagactgaggcaggagaatggcatgaacctgggaggcggagcctgcagtgagccttgattgggccactgcactccagcctgggcgacagagcaagactccatctcaaaaaaaaaaaaaaaaaaaagaaatattaagttggtttctgttaatttaatacgttaaagtcacaggttcatagcttgtcaaggcattcttgagacttatccagtagactggcaaagagcaccaaagtttgtgtgggtaattccaaatgtggagtagccatcaacacgtaactgtagcatttgccaagctccccactggcgagcaaggagtatatcctcagagccatgcaaaatgccatgcaagtgagaggtggtgatgagagtatgttagatggcaaatggatgcttatacggaggagcccagttctctgagccctgacctattcaaccgacagctttatgtgttctctgctagcacaaattttactttcaagtgcagtatctctgtgctttgccttttctcatgttgtttgaaactattcctctgaagatatattctattttgagaaggttttgtactcttgtgcaacttaagatagaaaaatgagctcaggggccaggcacagtggctcatgcctgtaatcccagcactttgggaggccgaggcgggcggatcacctgaggttgggagttcgagaccagcctgaacaaaatggagaaaccccatctctaccaaaaatacaaaattagccaggcatggtggtgcatgcctgtaatcccagctactcaggaggctgagacaggagaatggctttaactcgggaggtggaggttgcggtgagctgagatggcgccattgcactccagcctgggcaagaagagtgaaactctgccttaaaaaaaaaaaaaaagaaaaaagaaaaatgaactcaggaagctagacctggaaagcaatacagtgagtctttaatctaaatacttacctcattgataagaagggagaatccaagtccttgcactcggatggacaccacttccacaaatggctcatgagattaatttcattaatcatgacatttgcatggctgcagatagcttaaataaatttatacactcaacaaatatgtattgagctccttctatatggcagccactgagctgagctctgtggatccagcagtagacaaaagagatcaagtttctgtgctaatggaacttacattaaacaaaaatagcaggagctgagagatagagtggggaagagtgaatccatgagcaacttcatttgagatattctagctatggaaattctgtttctgcatatatccaggataaaattccctttccatataaaataaaaatattcctactttgtttctaacacaatttgtatttcaaattataataataatcttggattttccttctctgtatatgacttctcatccaaaaactgaggggctagaccacctgattacttgaattcctttttacctttacgactcttcattaaacagagcctcatgggtgtgatacatttcagttcttttccctactctttttagccccttgccttcccatgaagggcttgtctgtatctaaaagtcctcctggttcttgtggtacagcttgtgataccacgataaagactaagtgagatgcatttcctgaaacactgcagtcttctggccttttcttcccttttatatccacagaaccaagaaccagcaagaccatcagtcattgtacaggaataaacaatactgttaaacttgtcagccttttgatccttcccacatcattttttttagcccagttctaggaaaatttgccaaggctttttttttatggtgttgtatttgccatgccaacaaccaacaatagaatattgaggctatatgattttaggactcaaaaaaatcacataataataaaaagaggagctgagccaaatcctgtgtgtgtgtgtgtgtgtgtgtgtgtgtgtgtgtgtgtgtgtgagtgtgttgacagagacagacatagacagagtgagagagagaggagagtagtgatataaaaaataagaaataaaattcatttttgaaaggagcttagaagtgaactgtctcatacctagcttaatatgtcaaatagcctattggaaaaatgaagatttttccacagtgccaagctttgcattcatttcaggtggaatttgtgttaaatgtcaggaagtgtccagcacccttcacttatagaaaagaggcaatgtgggccacagtggaattgatttgtgttagcctggattgttcactctggattagactttgactgggaggtggcaccagtattgccccaggcaggtttatgtacaaaagacagagaacagtctggctgccaatcaggaaaacatgataggtcgtgtagttagcaagtggtaatagtctcattctacaagtgggaagtaatctcccatgctatggtcctgtatctcctctcctcatgtctaattcccctccacgctataaggttaaatgcaaattttccttcctctgcagtcttcttggatcactgcagtccctgaagacactgttttgtttgaattgaaaacacaaccaggatttgactcatttatcaattaatcattctaccttgcaaaattacgttgtattttctcagatccttatttcacttttaagtaattcagaccttgtcagaagctagactagaacttccatttttaaaattttcatctttgggcctgacactacgtattgaagacatttaactagatttgctcatgacttagtgtttcttgagactgtcacgcattcatacacacacatttgctaaaaaaaaaaaaaaaaagttagctttaagcaaaattttaaagtatgtagatgtgtcttattgactccattcttttcactttttctgggagccacgaaatccaatgtcttcaatttcacacccccactgcaaaaactgctaaaaaaattaaggcttttgcctagggaagaatttggctttagttactaatatcgtataataaatttaagcactttcttttttctgaaaattaacagtttcatccaattctactagtgaaatgacaaacattatcaccctccaaaatagttttacatgagcaagtttaggggaagagggaaaaaggtagagtgatggtgataacagaccttaagtgtggggggaaatcatactatggcagaaaacttctctagctatctatttgggttgactaagagcagcaactaagaataagagcagcaacatattcaatgatacagtcctggtaaaatattttaccaggctgagcgtggtggctcatgtctgtaatcccagcactttcggaagctgaaatgggtggattgcttgagcccaggagtttgaaaccagcctgggcaacatagcaaaaccccatttatacaaaaaatacacacaaaaataaccaggtgtggaggcgtgtgtttgtagtcccagctaccaggaaggctgagttgggaggatcacctaaaccagggaaggtcgatgctgcagtgagccctgatcatgccactgcactttagcctagatgacagagtgagatcctgtcttctccaaaaacaaatttttttttggagaatctgagaaaccagtccattcttggcagtcacacaaaatagacattttccaatgtctgtattggaataattgagacatgtgtatccttcatggcaataattgagacatgtgtatccttttattaaggaagacgggtcttgatgggtgctatggatctcttcctaagaaatgattatgctttgtctaggttttttttttttttgagaacatccatggtcagcaaaaatccatccagagagctctgctagtgaagaaagtgtgttatatggcaggaaagctttagagcaaaagtatgaatttgcagctttaaaaacatcctacctcaaaaagcattaattcatgaaagaaacatacattcataataaagtataacgtaaagcaatgcaaatattccaaatgatataatgatactggattatttgatgagtacctcattctattcttcattattatttacccaaagacgcaaaagttttcagttttgattggtgactaaagtaacaatataaaaacaaaaaattgttttaattttttgtacatgtacatgtaccaatttttttacacataaaaagttattagaattatctagtgattttagatatgtcctctattagtccattttcatactgctatagagaactgtccaagactaggtaatttataacagaaagaggtttaattgactcacagtttagcgtggctggggagtcctcaggaaacttacaatcatggtggaaggtgaagggaaagctaggcaccttcttcacaaggcagccggagagagagagatagcaaagggggaagagccccttataaaaccatcagatctcatgagaactcactcactatcatgagaacagcatgggggaaaccacccccatgattcaattacctccacctggtctctcccttgacatgtggggattatggggattacaattcaagatgagatttgagtggggacacaaagcctaaccatatcatgtccatagaataggctgttgttgaaatttaattttgattaccccagaatgcttcaagaatacagtgttttctgaatcttcagaggtggagaagtcttcctccctgtcacataatactgagataaacctttgcattctagaaaaatcttcataggccttcctttacatgagatatgacaaacccatttcaattaatatagcccatgattcaggaagttgtaccgagcagtaaattattttgctcaactcaggagtggagatttcaccaagtaggtaattgtgtcattcaaatacatgtcctggtattctcggtgttactggtacaggattaaagcttgtcatgtcagttgttaaatgttttaaattaaaaaggaataatttgtatacagattatatagaaggctcatcctgcatggatagatgcaaaacttatccctctgcttttttattccattatctgtctataagtgatgtctctctgtaggatatctgcatcgtcttggactgggttttctgttccctgtgactctctcctcttcctaataccatcctctaatcccaaatgcactggttttaaaacacaagtctataactttttactttaagttctactattgctgtgttatatggtttggctgtgtccctacccaaatgtcatcttgaattgtggttcccataatccccatgtttcatgggagggacccagtgggaggtaatttaatcctgggggcatttatcctcatgctgctcatgttttttcatgatagtgagttctcacaagatctgatggttttataaggggcttacccctttgctgagctctcattctctctcttgccaccctgtgaagagattccttctgcaatgattgtaagtttcttgaggcctccccagccatgtggaactatgagtcaaacctcattcctttataaactatccagtctcaggcagttctttacagcagcatgagaacagactaatgcactgtggcaattgatattttgcatatttttccgtattaggtgatatgtggtaaaaagatttgtactgagtaaaacattagatgtgccttcacccctaaagctgctttgatcaagttaatttcaaatatggcagaatagaggtattcaactttttaaccctgaaaattaaatttatgtcatattttgatataaagcaaaggaaaatcaactttaatcaaaacatacttgttttccctctcctatacagaccgaccaagaccatcactatgaccgatggagactatgattatctgatcaaactcctggccctcggggattcaggggtggggaagacaacatttctttatagatacacagataataaattcaatcccaaattcatcactacagtaggaatagactttcgggaaaaacgtgtggtgagtttttaatcgtacttctaaccttgtcactcatccccctatataaaataagaatcaagaagctatgtttattgcattggagtctgtcttttgtcacacgaaattcataacctgtcattttaatttattttagaatattatttactacttttcaactataaataacattttcctagaaaagtattaagtggcactctctcttgtctcccaaagtgtacaaggcaacccaaatcaatattttactgatttgcatagtgtgttttctacaaattcttaagaaatctttcaaaacttgaattattagaatttaaaaacattaactctgatctgagttaaagtcctcaataagagcaagtgatcatttccctactcttaagaaagaagttaaaagtatgattggcaaatatctggaacatgagctttgtaagctcttgctgcatttttatttatgtgtagactcagccatcaatcactggcttcttatgaacagaatgtgagaccaatcatgctgttttccaagataagagagtttaagtgagaatcacaaccacttccttctcctatgctagacgctattgacaggaataaggatattgtgacatgtgagatgtgtagcataggcacagaagctaggccagatttactgccaccctgggtattcttgattgccaagatggctgtggcttccagttgatgtcacaaatctactcattccctgagaattgggaaagaaaacaaaagaaatggtaactggaagccattgcctgggaagttgaatcacggtttttttataatgtgctggacctgatctgaaagtcaatacatggttgtgtaggcttagcaaactccctgacaacccattcagggttttcctgccttctctcctttccagtatctgggtatatgtcctggcagaattttccctttaaaacgtattcactaaactatacttaaggaaactgagtaaatattacatcttttaggctttgcttaaacaataaaaaggccagaatttttttaaaaaaattaaacttacctaaaaagagcctttgactaaatgattagtgaagaaaggcttgaaatgtcctgtgtcaacttattgagaaagtctgtgcatatttcatggctaagtcattttgaaagtccatttcacagtaaaagatattcggatatttgtaaagcactttactgttttaaaaaaactgcttttaccatctgtgatttcactgaagtgtgcagtttgaagtaactctgtaaatcaggaaggggttatgggtctcaatttagagataagaaaataagactcaaagaggttaaatgaagagtttgtatttgaacctagaacttgggtcctaaatctgatgtttgctgcctcatgaggaaatgacagaaggtgtctaatttaagtttgcaatatgcctaaactgtgttgaaaatcatacttgcacttgacatttaaaagtgagagtacatgtgataattctggaaaaaaataaagcaaatatttattctgcactatgaactttgattatagtaattgagaaaaaaacatgctgagtgaacccaaagaatttgagtgctgacaaaatccaaagcaacctcaactaatgaacgttgtatctttcaggtttataatgcacaaggaccgaatggatcttcagggaaagcatttaaagtgcatcttcagctttgggacactgcgggacaagagcggtaatagtaaattgctttatttgtggctacacatagcttagaaaaacttactttaaaatgaattctgtatgtgaacttgaaaaacaaataatattcaactcttctcctggtttcaaaatagacatttgtatccagaaataaaaataaatgatttgtaattaattaatcacagtagcactgtgcagttggtatgaatttcaaaaatcagactttcaaaaatctctctgaagattcttgctatgcactgtctttgcacttcttagaaggaaaaaaaggttctccagaatttaattgaatgaagatgggaaattaacgccgttataagtgctacttgaagagggagttgaagaaagggtgttaagatcttccttgtctctttctgttatttcagcacagcctctttgtcccatgccatgcgactggctttgtcctttcagactttgatcttaaaacaattgccctccagctagaatattttactccttcccacttttcctgatcctctccttgtaccaggcccagctcatatttcttctcttctatgaagcctgtctgaacatcccagctgaaacaaactcccacttttactctgaactactgcagacaccggttatttcacccttaaggtctaaataattatatgccaccttgtcatgaaatgaacattctatttgtatctttaactgttgttcactgattcacttggggccttctcactccaacaaaattgtcatctttacaggtgtggagatcttgcctggctttccagcattgtctctggtacagtgtccaagctaatactcggtagacagtagtgttaattccttagagctggaggtactattccattgttagatggaaaaacaaaagggatccaaaatttcaaagtgcaaaagaccccaagctaatgaagcttttcaatattagattaaattaaaagtggcaaaaaattggcagagaggatatttagaaggcacatacctccaaatcctgcatcgtgtgtcttagaatgcttatgcttgtaaacacttccatctttgaaatgcatccaaagcgttctcgcttttagcgagtgtaaatgccaggagaggtgctgggccctctctgttagcttttttgactgtgaattccatttacacacacccttcaacactgctggttcctctgaagccattcctcacaagaatctctgttcatatgtcagttttgttgtcacaaagatgtatgttttacagagcactttaattcatttttgaagaagtaatatgagaaaatgtggttcccatatgtcctcgcacatgatatgtcagccttgcatgatggcagccttctctgtctgtcccctgaaggcagctgctgtatgggggaaatggggaatactcagggcaggcttcagaacacttgggttattcatcacttgagaattttgcattctgtgtatatataaggtgtaactaagcaacaagataaacaatgcctcacacctcagccctgtgcctaaggacatctggctgtgcaatccatgtaagataatgggtattgatagaagtcacatcatgggaaggaagagaaaacacatggcccttaaggaaacttaaaggatacaaggcacagacttcattcccagtgagggggaggagtgataatgtagctttggggtctgtttcttctgtgatcctagtgttctggagcaaaaggggctcatcactcaatgcgctagaagccaatactatgacactggattttgagaaaaagaaaggttttattgcaaatcgacttgcagggagacaggagggtcaagctcaaatctgtctttttgttctggctttttgaagtagtagttttattagaaaaagttgtggcaggggtgggttctaaaggggagggctggaaagtccttggacgtgggcagttatctctgcattctatctcaggggtcacgtgtggaaattcaaggggagttagtatgaaacatgtggtagaaattcaggctgtgacattagcaagctcattctgtacagattccagtcggccatatcggttccagtcgatttcagccagttctcttatcttataagcagagggagtttcagtgtttcagcaagttatttccttctttatctgccatcctgcaaactcaatttctgttcatcattggtttctgtaactctttggaacatggtttcactggttcctccaccctgctgactcaatagacagaatgagatgggtgggggaggctggaaatgaattacttgtctccccgtgggggaaatgggggatatcaaagatactggacagaatagagcaagatgtctgttactgctctggaacaagcgtgtcctatccatcctgctggggaggagaaattgtttgccccaaacagatcactacagcaagcatgtttttgagtaactttgtcatacgctctgggcaatgagagggaataacacacagttttgttctcaaatgagacacacacacttaaggagagaacaaagagcagttttcctggcatgacacaattatggtcaagtaggagacaattttgtgggtacagctagtttccaaagagggagaattattcaatcaaagcactataatctctgtgggcttccaaggaatggtagaaacaaatccacaagaaaaaattgaataaatttttttggtatttctgctctacagttttagatcatgatgatgccctacagacaaatcctactttggaaataaatagcagtgaaaatatctcttctcccatcttttggtatgaaaagtatcattctctgttgcagtcatttaaaatatttaataattgtatatcttttactgtttctttctttcacttgcactgtttaacttcacaaatatttagtgagcaaataccaggttctgagccatgaaaatatgatggatagcaagttagaaacacagctcccttccccttagagcttacagtctagggtagaatttggatgaataaacaatcgcaatggagccttaggatactaacaggaaaacaaagacataggcaggcccaccaggaggagcgcatagcccacatgcagtgttgggaaggccccttcgggaagtgttatttcctctgataccattatgtatttgctcatgcacaatgtatgagtgagtgctatccaggctcaacgaaggggtaggaagaaaaggaagcactaagactaagtaacccacagaaagaccagcatgtgtgaaagcccaggggagcagagtgaactttctaagaactaaaagaagatcagcatgtctgtgggtagtcaaagggatgaagttggatagatgaacaaagatcacttcctgcagagccttgccagctttgtaaggagtttgtgcattaccttacgagtgatgtctaatcattaaaatgtcgttagtagagcattgatataatctatgggaagaaatggagtggtgataggagtagggtcccaaacaaaactggacacgggaagcctaatcagaaagctgttgaagttgtccaggtgagagagaatgggtttggaagtagagtagtggcagagtagatggccagaaatgagaaggtcgaaagatatatgttaactgtagacaccaggtgaaggaggaagggatcatggcaaccagaagggtggtgatgtcataaacagaaaaagaaattaggaagagtggccagtttggttttggatgtatgaagttggagatgcctgagtttccaccagctggaagtatccaacaagtaattaggcatctaatgtgaaaggcagggaacatctggatctctaattttgggcttctcaacacacaggctacaaatgagccacggaagtggataagattatccagtcaatgtatatagagtaagaggggtcaagaatagacctctgaggaaaccaacacaaaggatctataaaaaggctaaaataggagaccaaaaattagaagaacatttaggataggaagcgatatctctagttcaaagttatgtgcctttctaaaaacccattgccaaattcaaaaccttctctggtccctacatgtggtctctggttttgcccattgctcttattgaagtgaatctcagcacatctttaacttcactgaagatggttggtggtggctggggtcgggggtgagggcatggaaagctgaccaggcagggaaaaactttgcattgcacacgaaagagcaaattctctaaaatcctcattagaaatgagagttctttccttctttccccaatgactatgtctcttttctgtcctgacccccactcagtcctccaatcatcttccttttcctcgtgaatcctagatgccaacctgaagctcagttttacccccaaacagtgctttttgaaaagagttttgtcatcaatattcttccttacaaaagaattccaattcctgtagctaacaagttgcggtttccttcatatcatcacaggcattcattttcaggctactgtgtgccaagctttcttctgggcacagacaagaaagatggaaagtataggttaaagtccccactctaaagtgctttacattttaaatgtggaccacaaaatgcccacgagccaaaaagattccaagaagctgtgtaagcaaatccatgattgaatgttacaaactgtgtgtataaagtgctgtgagatcagaaagccaggaagtggtcttaaaaaaaaaaactacaaccaaatcttctctcttggttcttcagcaatttctctgcccacattcccatttccctaagatattccataagggccagtcacggagaattcatacctgaaagggaaactgttatttgtgttgttgtcaaagatatgtggactaactttcagaactacccactgtgtttccttggcaggttccggagtctcaccactgcatttttcagagacgccatgggcttcttattaatgtttgacctcaccagtcaacagagcttcttaaatgtcagaaactggatgagtaagtgggactgagtaatgtgcattggccgctttgggactcaactgccttaggtgcttgttggtcttgcaagatgaaaccagattgggtaccacagattaactttcaaagtcatgagtttagtgttgcctgtgccactgtgtcaccttcaaagtggtggcctttatgtggaccaccctaggtagcttggaatagtattttctaaatatctaaaaattgatatttttagaggaagcctatgtagctttatcaccacttgtatttaagatctttattattgtcattgaaaggccattgattccacttttccagtaagtcttgaaggacttcttaaaactaagtgagctactacatttgacctggggagatcacagggaaaatcggcagtattttctgaggggacactggcactgaaggtgtgttaaacactagtgggttaattaggtgtgaaaccagagcagaccagtcgcatgatgataaggtgaggcatagcacagtgtgtcagtcagtcagctcgcttgggaattttacttttaaaaaggggttcaaatgtgaggaaaccatgtaaagacaaatctccagcccctgtggaaacttcgatatagtacaaattgaaatgttgcctaatcaattactaaagtcatattgacatacatcaccacaggagagaagtattggaattttcctttgttttacttgatgtcataataaagggcatatttcatttgtattttttattacaaataagaattttgatcctagcaggatatacaagtagcaggacagctgagtcgtcctatggggctgctcttatcatttccagatttgtctgggccatctgtagctagagttgtattttttaaaaactagatcatgttattttcctgctcagagtccttctgtaactttccatcttacccggaataaaatccagagtccttcacttacctacaaggtcactgtgatgatgtctgggcttcctccgtaattccctcttacttgggccccgttcactagccttcagccaaactgcctcacatgctattcccagtatgaaaatcttgccattccctttatcttttttctcttctctcatttacagccctgtgctagtttcttcattcccttcaagttctggccaaactttatttacctcttgactgaccactccatctaaaatagtactcatcactctgtatcccctcaacacactttataggtcatggccatcacctgataatgtgttatgtattttttggtttacttgttgtgttagttcattcttgcattgctgtaaagaaattcctgagactgggtaatttataaagaaaagaggtttaattgactcacagttctgcaggctgtatgggaagcatgtggctggcatctgcttggcttctggggaggactcaggaaacttacaatcatggggaaggtgacgggggagcaggcacatctgacatagcaggagcagcaagtgagcaaagggggacgtgccacacacttctaagtaaccagacctcatgagaactcactatcatgagaacagtaccaggggatggtgctagaccattcatgagaaatactcccccaggatccagttgcctcccactaggccccacctcccacattggggattacatttcaacgttggacatagatccaaaccatatcacttctacacccacttcaagttttacccaaaccttatttgtctcttgactgaccaccccatctgaaatagtactcatcactttgtatcccctcaacacgctttagagttcattcagtcccagccatcacctgacatgatgtgatgtatttttggtttacttgtgtttttgatgctttctaccactagaatgtaagctcttatgagagtgcagacttttccattttatttcaatgcaatatgccatacctgggtgagtgcctggcacagagtagatgctcaaaatagatatatttcttatcactacatattatgcaaaattgataatgtattttgtatataattcatgattatatataataattatatagaaccactctcggtgtgggttcaataaccttgtaactaatggggaaacaaattctgactttcataattgcttctccaaatgaacgtttatcttaggatctgtcctttatttccatttaatattgtatttcattacccaaattttggtggtagctttagattcccaggagacaaggagataataagcttattaaattctttcagagaatggtttgtttatcctttttcaaggcagatgagagtctcccttgtttttaaacgtctccagaaggatattgctgagatttaagataattaattgtcatgcctaataacactttaatttttaacacccaagtaattggtgttacagagttagcctttctttgtcttcttcctctagtcttggcaaggtagcacacagcatgccttatgatagacattagagcagcctctgtaacctcaaaaacacagcttgacaggtttcttatatttttttccctttttttcttaccatgcccttcctgccctgccctgccctcccctcgccaactctccctcccttcctccctccctccctccctcccttccttacttccctccctccctccctcctctttctctctctctcctcccccctccgcccacacatagtgttttttggagaaaagagaaaaacaaattactggtcttaaaattgtttctacatgaatttgtagtgattaaaaaatgctccacactatagatcatcatttcggaggttagagaaaggaaaggtaacaacttcctaaaggaaaaaacaaatttacccacttaaaaatcatgttctatttacctccatctatatttgaggaacaaatggtgtgaagcagttatggccatctcagggagcatttccccagatgtattccgtatttactgaatacttactatgtgctagcaacttggtatgtattattagaagatatgctgtattattagaagaaatccccttatttattattatgtatgtgtattatgtattattagaagaaatccccttaaccaagaatagcacatggattgaaaagatcttccagaggaatatatgtgatgttttaatgaattacttaataataaaagcacctaacatttactaaatgtttggtgttgacagaggtgcttcatatatattattagaagaaatctccttaagcaagaacagcgcatggattaaaaagatcttccaaaggaatacatatgatgtattaatgaattacttaataataaaagcacctaacatttactaaatgttgggtattgatacaggtgtttcatatatattattagtccccttcataatctgaaatttgtaaggtgttatctccgttttacagataagcacattgtgactgggaagaggaagtaacttggccaatataactagtaagcaaccaaactggagataagcaattagatcaggaatctggaataagagcagtcatttgacatcacttatttatcaataacttgctggttccatctgctttcttttcaaggccaactgcaagcaaatgcttattgtgaaaatccagatatagtattaattggcaacaaggcagacctaccagatcagagggaagtcaatgaacggcaagctcgggaactggctgacaaatatgggtaagtcagttacactgagatggcatgtgacttgcacactgctgttcagcaaatggagcagagacattagattgatattagaagaaatccccttaaccaagaacagcatgtggattaaaaagatctttcagagagatatatatgatgtattaatgaattacttaataataagagcacctaacatttactgtatacctataatgtgctagcaacagttcctagacattaactcattttaacccatcataactagagttatctcattttatatataagaattgagtcacagagagattaagtaactgatggaaggccaccccacacagttagtgacaggcagagcttaaactcaatccagacagtctgatatcaaagctcatgctcttaaacactgtattcttctgcctctcaatcaatagatgtaaaactccaagaaataatccctgacaagggtatgaaaatgtggtctttatcccagctgagcttgaatggcagcttaaaaaaaaaaacagaaacaacaccccatgtaattgtaaattgacttccgtggcagaatctgtcattattctttaaatttaaagtagttttatcatatctgccaattttttatggaagaattctccctaaaagctgtacaatttacacgtctttcttgaaacttttaaatccaaataaacattgactgtattcacacaaatatccttattcaatgcatacctattttttaaaggagatttccagataattgagtggaagggaagcaatattttaatagtaacattggtcagtagttttattgatcagagggtatttttcccctcctaatttttttaaacagtgataatgccttggcttcaacttcctgactacctcttgtgtcaatttccttgcccataaaactggttgtaatcatactaaagagcagctcaccaatttttactcactgaggaaaaaacaaggatgctttccaacttagccagcaaaaccataatcatttcacaatctctcagccagccgtttttgcatgtgtgattcacttgtacatcttgctgtatctgttctgatttcttcctctcaaaaatatttgccatcctttctatgctagcataccatattttgaaacaagtgcagcaactggacagaatgtggagaaagctgtagaaacccttttggacttaatcatgaagcgaatggaacagtgtgtggagaagacacaaatccctgatactgtcaatggtggaaattctggaaacttggatggggaaaagccaccagagaagaaatgtatctgctagactctacatagaaactgaacatcaagaaccccaccaaaatattacttttaaaaacaatgacaaaccacacaattgttgttgagtaaaccacgcacaatggcatgtctttctttttctgccagaaaatctattttaagaaaccagaatagtcaacagtgttcaaaagaattgactagttatccctgaggccctttcaaacatgatcaaagatttcccaatgtgatctcatcatcatggatactcaatttgttttttcttatagagaaaatgagtatataagacaatatacaagaagaaatatcagtgagttttaaatcagaacaagttacctgtcacattgaagaaaagggtaggcactaaagggagaacacagaaagaagaatttctaaaatattggatttacttcttatattgagtcagatgcatacttttagatttgcattggggaaaatgtactagctaaaaatggatacacaatgaagaattctatttggctaattaagaatgatatactatgtacacccaataagctgtactagaatgaataaattactgataaggttac

SEQ ID NO: 764 - DNA, 75989 bp, Homo sapiens
gggaggagagaaaagccatggccggtgagtcttttactgtcccaaaaacaggcccctgggaggaaaaagttgtggaaggcgcttgctcttctggaagctatcatcagtatctgtggaggtttatgtgagcaaaagtgagggacagggaggagagtgaggagagaagaaattagatgactcttgcagcctttagaaaggaaaggaaagcccagaaaggaactgaggctttaggagtagcttgctgtcattttgcaatcttatttaaactcttacatgttgtaagtgtggcagaggctacagaattggcacaggaggagtactagcagcagtggttcctaaatgaaatgggctatttctgtttcattactttattattcagagttaaataatcatgtgacataagaggatgatttctgctttccagggactaatgtggaaatggtaaactgagtcttcaggccactccatgcacatgtatggagactattgagggaaacaagtagtacagcgataaagtaagaagagggattacccaactgtgaggagggggacatttcactgatgaaatctaaatgaggttgccttctggtgatgacatgagaggaatatgaggctgttttcatgatgtgagaaatccttgtgctccaaacagacaaggtcctgaaggagaagagaaagcagtttatccgttcagtgggcgaaggtacaataaatggcttactgggtgaattattggagacaagggtgctgagccaggaagagatagagatagtaaaatgtgaaaatgctacagttatggataaggcccgagctttgcttgactctgttattcggaaaggggctccagcatgccaaatttgcatcacatacatttgtgaagaagacagtcacctggcagggacgctgggactctcagcaggtaagggtcagtgactcatactcaagttcgcctagggcctgtcattgtgactaccatgtgatgtctttactagtcatgttaagttgcagaaaacttccttctctctggcttcaggcaatatttctgtaacacgggccctactgcatgtcccttgactctccttcgtttctgtttactcatcctcagtggccctcttctgattaaagcacatttcctgttctgagtaagcggtagctgatttcctgaaggttatgagaactatctaaaaagcttcacactatatgttccactgttccaggcgaggcacaatatttattgattgatttagtatttttgagtccagggtgtacccaggcacttatgtagttgtctgtcatgaaggtttaaggtctgtaattaaatacgttttataacttctctccaaaatattgccctccaagaagaataagttatatttcaaaagtggtgatatactcagagaatacactgaatgattatagaaaagtaaggatttcaagttggctttttcctcccgttgcctccttgcattttcttttgagtaagatcacccacttgcctgttatcaggctgtggatcatgctgtgagccctggactgcctccatttgtggccaccttgtgacctgatacagtgcacaggaaatgagttggcccattcctgtgatcccttggacctaccacatggtgaggatgagagttctggtggactcctagttactggtctctgtggtactttccaatgccacttcagaggcagatgttctttcaaagtaaaaggctttttttgttttgttttgttttctaagggttagaggaagcttacgcctgtctaagcagacatgggagaagtttatgttttcatctatgtgtaataaatgtcatatttttctgacaatgtctctttcattttatacccccacgactctctaaattaaagaacattttgaacgttatttaatgtcgttcagtcagggttgtgggaggaatctttagtggggagtgttgtaagcattagggtaaagttttccagagatgataagtgactatttcaatgtccttcttctttctctaggtccaacatctggaaatcaccttactacacaagattctcaaatagtacttccttcctaggtaatgctgtttttaaagaaagagcattctttgaaccgtggcttcccgtgacattaatgttgtaggatgaaccacagttaaaggggctatgaagaattcccatagagtgatcatacaattttctttttgtaatctattctgcttttgtagcaactgtcaaaacagcttcactatctatgtttacattaaaatttggaatcagtatctcaaatcctgattacccaaataagtaccaaacttcatcatttaagcctactgaaatattccctcacgtctcctagagacacctttatctaaacaatatcagagctgaacatgccattcttccccaccctgcttctcttccagttttgtgtaactcggttattgatgtcaccatcaccagttgttcaaaccaggaacttgaaacacatcttggcccctttcctctcacgcatctccaatattcaagccaccgccaagttttatgcattcttctctcaaatttggaactgtctcgctatttcttcttctatttcattaaaaacccctattcatcaagggccctcttaaaataaaagaaacttatatttaaaagcaatttagaggcaagaagtgtaaatttttctatcaacttcagtttttactctattgaatttattaaggttgattaactcatgaatattttcttaaatgttttacagcatgggacactcactatataaccaaatactgcattttcactaagaaaaattacctcaaacataactcatatacctctatttagtttttttatgtcgttttcattcttctttctgaagaaaccaaacatttcttctatcaaattactaatttttagttttctccaatatatccattccaattagttcttccccaagtcaacacaattcatgctgcctttatttatctaactaattgtataacagtttctcaaacttgttttcaaaattaaatattatttccttgacataatagtttctaaaagatactccacaaatctagaaaactaatttctatcttgaaacaaagattacattaagttttttaacaactatatcacattgtcggatggtgttgtactggtgatgaaataaaagctgcaaggattttttcacataaactctgtgaaaacatttcctcatatgtctgtgcagtcaatgttaagtgctataaatccatctagtgtgcactttgattttagcatttatcattctagttcatatatttaataatctccttcttccatatgtatacatagtaggaagagatcctgaaggacaggccaaagttcattaaaaaagtattcctagtgcttactaccatgtctattcagtaaataaataaagagataaacatatttcttaaagatttttggtagattttgttaagacctcctcccattaaattttattctatggttcaaatcttttgaaataaatttatgttctattttatctcacacatttgattgttttctgagcattttttcatgcatggccttgaaaagcttcctttctacatttttatctaaaatacttgtaaaaatactgatcctgaaatatgaaaggagatccctgtattgcacacctggaaatctctggctggaaatgtactccattagcagtgaaattattcagcggtgaaagatcaggattgtcttcctaagaatgcatttccacttttgtggcttcatccttaggtgaggctgtaagaaacacaaagcggaacaaagagggatgccaatgttcatgatattctttgactcttgcgactcctcaggctgtggcagtgtgggacagccctgctatgcctacatcctcaggctcaggaggaagcatcaagctttgctccctagacgaagctaaaaggatatggaaagaaaagttgacagaggtgccatgctcagaacacaaggttagagtggggtgaaagatacatttgaggcaattctgaaatgcagtggctttttcttagagctgttctcaacggagaatcttacttctgcttcctttacctaaaaaaaaaaaaaaaatcctgcatcctaggatcccaggtttatagaaacagttcctaattgcacccaattcctggataaataacatcaacaatggcagctattgaatgttcactaagagtgggcactgttctaagcattttgtacatgataatacataatttttaaccttaaaaataatccattttagagatctagaagctgagacatggggttgttaaatattctgcccaaagaaaaacaataaaaaattagagcaatcagttttagaattcaggcattctggcttcaaagcttgtgcatttttcaaaatcctacgtatcaagaaaaatgaagtcagtagctaacctgccatctgggcctttgcagtttctatgcctactctcgaagtagcactgaattccgttccccattttcaatgtgtagtccaagggatttggtaccttgataggactaagaaagggaaaatggtcataaattaaccaggtgaatattaaattacagagaataagactattcatccaaactgcatttcctacagatttatccaataatgggcaagtcaagctgcacacatcatgcttgctctcattatctttaacaaagagtttgacagtctttctaaaagagtgggagctgaggttgatgtcataggcatgatgatgctgctacaaaatctggggtacaaggtggatgagaaaagaaatctcactgcttcggtaaggtctattataccatagagacaacggtcatgccctttgtgtaactaaataatattagaaagcttggttgtaggaccaagaattgtaatctgttgataatctaaaatataaacttgccatggaaggatgctggatgctacatattcccctgaaacatcagagtcattcagcatgagtctggtttaacttaaatgtgaaggttttttttttttttttctcagtaatgccacgttctctttaccagataactctgaatgacttcctacaacaccttccttcacctttctcgaaattaagactaaaaggttttttggccctccattgtttgtcatgaaattacttaagaaatccttaagtacttatttattggctttccaaggtgccatgagggttaatcacatagtccaaaatcagcagtatggtctctttcaggaaatgactacagagttggaggtattttctctgcaccaagagcacaaggcctctggtctcatggtattcgggaaggcatttgtgggaagaaatactctgagcaagtcccagatgtattacaactcaatgaaatctttaaaacgttgaatagcaagaactgcccaagtttgaaggacaaacccaaggtgataatcatccaggcctgccatgttggtgaggctaatgtctttgagaacaccagacattcaaatactgtcctcatctgtattcatcatgaattttcagtttatgtctgttttttagtgtcaaagaacatacactgtcagcactcaagatgtggcttctgtgaattgtatgactggttggtagatatttgttttatattcaagtctgagactttgatgtttggtggtttttaaaattagtttgagagttagaagaaataagaattgttgaaagaatgttacttgaatgtatgtgtgtatgtgcatgtgaattaatgatagagcaaatatattgataaatatgattgaacagacgctaagaggagaacgttgtcctctcagccattggtagtagtaacaaaccaaattttgtctttccagagaaccatggtgtggtgttggtaaaagattcagtaccggcctctgaaaatatatctttaccaactccgggagattttgaggatgatgctattaatcaagtacacatagagaaggattttattgctttctgctcttccacattaggtaacaggtttcttgtacacagaacatctttgtgggtgttatcaatagaaaaactcacagccacccactagagggtagatacctgtgcagaactttagataagatttttgaacacaaactaaagctttgttccaagttatacacaggattccctttatcctcaaagagcaagtaagcacttcttttcactgatttagtaattaatgaactcctctctgttgcaaaatattttagaactgtgagagataacagagaatgaaatggaagacgatctctgctgtagaacattagagtctgactctacatagaaaaggtcctccatgttgagatcattcaatggaccaattgggcctaacatcaagtattcataggagaagagtagaagcagggttcagaaaagtagaacagcaagcgaggaactttgggcccctaaattaaagtgggttttacctagaagcaagtatataaagcagaatatatacgcattattctaaatgtatgctttgcagtaagaatcttgctattattgacagatctagtcatttagtactttgtaaactagctccactagttcctccctgtactttccttgaattactcactaatatatatgaatataaatatcattttttaaggattaaagaaattaatatatgtgaaatattgcacatgacagaaagaagtacacattaaagaactggtattatttaaaatgtttttattttataacttcattcagttacttttcttagcaaggtttaaataaaaatgacttgaatgcttttatccaccttgtatggcagtttcctgagaggactcgcattgtcttggtcacctctggctcaaaggccctgcctctgctcaagtagttaaattttctgaaataatttgtacaatgagatatcttctttcagaagaagtttggttctatattgtcttgaacatgccctgatgcagaactcaatattttttcaatgatcaaaaccaatgacaagataaacacacaaaaaaatacatttccagcctgagtacatagagtagactataacattagacagaactgttctttaatatcctttgatcccagccttccacatgacattcatggccctctatatagcattttgtaggcccccggcttctcatcaccaatcctgctgatttccgtgtttttcttttctttcattttccttactcctcctttccatatgactgtcagaaactccatttagttatttataactcccatattaagcctagctccacattctgctgtgcaaatcccaactatttcatagtgctctcctgaggaaaagtaactatctacttccttaatttcacaaaacatttgcagaaacacctgtttccaccttatctcttacctacttccttcaactaagatagctgtggttctaaatagaattttattattaatatacactttatgaccattataattggctgaaatgtgtcattaaagaagtctgtgattatacacagagctattgctactgcttttctcttatgcctccctttgtataattttcacatgtcttcattacttccgtgtctaccatgtaataaatattgttttctttaatatttttctcttccataagaacttcttattgtccattatgatgtcaacatccttttattgacttttcctagatttctacttttgttctgttttatgatttttatggttaactcttcgtgtggaaatatcttacagtcaatgttattaaattttcattaaaattttatgtgaagtacatacattgagaatttattaacataattaccctgtatagactgagtattacataccctttgttagctcagacactagtgtagactcagatatctcctgtgtatgaaattgttaccattccctgtatagctgagtctattgcatatcagcatggacaattaacttaaatcacagtcagtaacagcactttggggatgcacatttagatatttctttttcaaatcccaattccttccctttaccacattctgccttttcctaactctctactaaatttacgactgtaactctgggactatgcaacgttagtacctgcaccatatacagcaccatttagagtatcagtaaaaatatactcactgaacttcaaatgtattcactaaaaaatacagtgaagtgtatggaaaatagatgaactccaaaatatgcctcagctggagcagaaatactagagtttcttctctttcttcgggcaagagtcaatcttgagatttaaagctttatcaatagataatgtttgctggagacatcctgcaaagggctctttttgttatgagtcattgaacaactgcaagaatattcctgttcctgtgatgtggaggaaattttccacaagatagggctctagtggatgctattttcactctgcttccccgaatgcttggctattgcaattggaagcatagaaagcagatccagacatgtttatcttccaataacacccttccttccaaaaaagttttgaagttctttggagagtgaacaagcctgggagccagatccaatctgttaagaccaacagcctcaataaaataatcatttagtttcacccacctcctgccctgcagagacacatgaatggactctaatttccctgtgtccctcatggacattagatccaaccacagatttaaaacgccctgaggagagtgattcaatgcttagataagcacatggctgtacttgttgtagatacaagtactttttgttttcatcacttactttgctagatttgttttagcctttttggcatgagttaataatcttttcagaaaaacaggtctccagactttcttttctctttcaggttcaactttcatttgagcagccagatgataaagcacagatgcccagcactgaaagagttacttcgacaagacgtttctatctcttcccagtacattaaaataaggaagctgtatgaatgtctgagggccggtatgtgtgtgtggtcaggagtgtgggaaggttgagtaaagtgtactgaaagtccattttagtcaaggactcgaagtctaccgattgagaatttttaatccaaaaatttaaattttgaaatgctctaaaatccaaaactgtgtgagcgcccacatgatattcaaaggaaatgcttattgaagcatttcaaattttaggtttttggaataaggatgctaaaccagtaagtataatgtagatattccaatatacaaaaatatctgaatttcaaaatacttcaggtagcatgaattttggataagggataatcaagccgtggcataatatacagaaaatactgaagtaatgcctttcttctggtctctgcagagcatgctgctcttcttccaaagtttttctttttttcttttagaccctttctgagggtcagctgatattgacctagaagtggccataagtctatgaaggctgactcttagatgtttctccccttcacctcagcagggtaacattttaaaatagcatgtggcctttccttttaaggttgcatatgttcccattggtggtataactttataacttacatttcttttagcaaaattctcttttatgcttgttttttttccccataggaaacctagagtttcttcattctgtaatggtttttggaattatatctgtttaataatagacttctgaacattttaataaatctgatataaaagtaaaaacatgtcctcagttttcttccacattggagcaacagtggttggaaatcagagggagtactgaatttagaatgttagacttaatccgtaagacctgaactggctattggcaccattttttcattcaaaataccatttgctgctggattgaagacacaaattacaaattagggatgcagatacaaattaccacaggtacccgacttcaaaaaatttagagctctgcaggagagatggaaagaagacgaatagttatgacagtgacactgcagtgggataagggacttttcccaaatcccagtttactaccaaaaatccatcaacagaacctgcatatttctaccctttgttaaggtatttaagagagagaaagtaaattttgaattaactgtagaccttcagtagttcacagacttcttgaaaaggtaagacatacatcaaaaatgaagcgcttggcagatggtgcatgacaccctgaagaaactctaggatgcatggtgtgcacagtgaagtccctgcatggcgcaaagaaaatgagttagggctgaaatcactcactcagggatgttaagatttagggaggattggaagaactaccctttcacctgcaaatatgaaccttttctaatctttatcctattaattcaaagtgaatatctgaccttttaaaaaccttcgtagttgagcacattacaatccctttttttgtgtggccttttattaactgtttgtctgggcacgtcttttctgtactattgtgcatattctactacaacctaagactacatctgtgatcagtctttgcgcagagaatatcaaaaagcagaagtaaattgtcaccctcagtaaaaattaattgttaaggcaatcttaagcagttgaaggaaagcattccagggagtaaagggattcctccagagcgctctccaatcaaagggtaagatgacagggagatgtggaggggaagacactgtcatgattcctcagcacagtttaaacggttgcaggtgccaatagtttttgtttttgtcatttatgttgctgtatttgttgcagtttttctggtgtaagattctacatcacaaaaggtccacagactttctcttcttaggtccaattttcatttgagcttccagaggtagggcacagatgctcatcactgagtgacattgacaagatgtttctatctcttcctaggacattaaaagaagtaggttgtatgaatgtccgtgggcaaatgtctgtatgtttgtgttggggatttgaagaagttggagaggagtactgaagctccattctggtcaaggtgtctagttctaaatgtgttactcttcatccaaaatttcaaaatctgaaatcctccagtatctacattctttcctattacctcccacttttttttaatcaaaaagagacactgaaaagtctgcaataattgctagtttaaatgccttcgttccattaaattgtaagagtgtctcctattgatattttttttttatataattccaacttttattttccatcaaggggtacatgtgcaggtttgtgacctaggtatattgcatgatgctgtggttttggtgacaattgctcctctcatccaagttgttagcatagtacataatagttagtttctcaacccttgaccctctacctccgtcctccctcttattgaccccagtgtccattgagcccatttgtattctatgtgtacccaatgtgattattcttttgtttctgtacccattaacattccccaaattcccccacaccacactatgcttcccagcctctggaaataattcttcaactctctgtttcattgagttcaaatatttgaaattttagcttccacaaataagtttgatttgcatttcactaataataatgttgtgcattttttcatatacctgtttggcgtttgtatgtactcttttgagaaatgtctatttagatcttctgcccatttttaaatcagattattaaaattttctccttcagaattgtttgagctccttatatattctggtttttaatcccttgccagatggattgtttgcaattttttgcccattctgtgagttttttctttactttgttgattgtttcctttgctgtgcagaaggtttttaacttgatgtaatcccatttgtccatttttgctttggttactcatgcttctggagtgttactcaaaaaatctttcttagtccaaaggactggagagtttctctattttttgtaagagttccatagtttgaggtctttgatttaagtctttgattcattttggtatgatttttgtatatggcaggagtcaggggtctaggttcattcttttgcatgtggatatccagtttattttcagtaccatttattaaagagacagtcctctcaccattgtcaaaaatgagttcactgtagatgtgtggatttatctctgggttttgtaatctgttccattgatttatttgtctgtttttataccagtactatgacattttgataattacagttctgcagtgtaacttaaagtcaggtaatgtgattcttacagttttgttatttttcttcagagtacctttggctgttttagatcttttgtggttctatatacattttaggatttctttttattttattatttctgtgaagaatgccaatggtatctttataaggactgcattgaatctatagattgctttaggcagtagagacatgttaacaatattgactcttccaatccataaacaatttttaaaaattttttgcatcctctttaatatctttcattaatgttttatagttttcatggcaagggtcttctacttctttggttaatgtaattcctaggtatttaattttaattctagctattgtatatggaataattttcttgatctctttttcagcttgcttaccattggcatatagaaatactattaaattttgcacattaatttttgtatcttgcaatgtttctgaattagtttatcaggtctaagagttttttggtggagtctttaggatttttcagatataaggtcacatagtctgcaaacaaggataatttgacttcttcctttccaatctcgatgccctttatttctttatcttttctaattgctctgcctaggacttgcaacactatgttggataacagtgttgaaagtggacatcctgatcttagaggagaggcgttcagttttccccactcagtataatactagctgtggatctgtagtatatgacttttattatgttgaagtatgttctttcagtacctgttgtttttttttgaggattttcatgatgaaggtattttgaattttattaaatgctttttcaacatcaatttaaatgattttatgttttttgtcctttcttctgttgatacaatgtatcacattaattgatttacatatgttgaacaattcttgcatcccttggataaatcttgcttggtcatgatgaatgatcttttgaatgtgttgttgaatttggcttgctagtgttttgttatggatatttgtatcaatattcatcaatcatactggccgaaattttctttctttttttttttttttgatgtgcctttgtctggttttggtatcagagtaatgctgtccttgtaatgagtttggaagtatttcttcctcctctgttagtctaaggttttttttccttcaaattattttaagttgtggtgtacttgtgtaggatgtgcaggtttgttacataggtaaatgtttgtcttggtggtttgctgtacagattaaccaatcatctaggtattaacccagaatccatcagctattcttcctgatgccctcccttcccctgaccccctcataggccctagcatgtgttgttctcttcgctatgtaaatgtgttctcattgttcagttcccactttaagtgagaacatgaggtgtttgcttttctgttcctgcattagtttgttgaggataatggcttccacctccatccatgttcttgggaaggacatgatctgatttctttttatggctgcatagtattccagcatgatgttccatgatgtagctgcacagtattccatgatgtatacataccaccctttcttattcctatctatcactgatgggcatttaggttgattccacgtctttgctattgtgaacagtgctgcagtgaaaatacgcttccatttatctttgtaatagaatgatttatattcttttgggtatgaaaatctccaatctacttcccacagtgctgaactaattcaggtttccaccaatattgtacaggcattgctttctcttcacagtgttgccagcatctgttattttttgacttttattttcacacaaaaaataaaaggagaaaacacttctcaacttattctgtgagaccaatattaacttgatatcagaacttcacaatagcaaagactggaatcaacccaaatgcccatcagcgatagactggataaagaaaatgtggtacatatatgccatctaatactatgcaaccataaagaaggataagatcatgtcctttgcagagacatgaattacctggtagcaattatcctcagaaaactggcatagaaacagaaaaccaaacactgcatgtcctcacttataagtgggagctgaacaatgagaacacatgaacacatggaggagaacaacacacactggggcctgacagggggatttgaagggagggagagcattaggaaaaatatctaatgcatgcttggcttaataactaggtgatagattggtctgtgtagcaaaccaccatggtacacgtttacctaagtcacaaacctgcacatgctgcacattaatcccagaaattaaaaaattatatctaataaattcacaaataaaattatcaaaaattctaaaaaactgaatccagcaactataaaaactattatacatgatgaccaatgatatactatgggtgttttattaatagccattctgattggtgtgacatggtgctttatggtgattttggttcgtttttctctgatgattagtgatgttgaaaattttttcatacattttttgctacttgtttgtcttgttttgagaaatgtttgttcatgtctttcacctactttttaatagggttacttattttttcctgctgagttggtttagttacttacaggttctggatattggacctttgttggatacattgtaaatatgttctctcattctgtcttagcaccatttattgaatagggagtccattccccattgcttatttttgtccacattgtcaaagaaaagatggcatacagctttatttctaagtttttcattttgtctattagtctatgtgtctgtttttgtacgaggaccacactgtttttgttactgtagccttatagtacagattgaagtcaggtaaggtaatgcctccagctttgtttttgttgcttagggtggctttggctattcaggctcttcactggttccacatgaattttagaattgtttttatttttcactctgtgaaaaatggcattgatcatttgataggaataacactgaatctgtggattgccttgggcagatggccattttaatggtattgattcttttactttgtgagcatggaatgttttcccatttgtttgtgtcatatctgattttagtgttttgtagttctccttgtagagatcttttggaatattcctgggtattttcttttccttttttggctactgcaattgaggtgagttcttgatttggctctcagcttcgacagttttggtgtacagaagtgctactgaattttgtacattggaggacagtttgacttcttcttttcctatttggatgccttttatttccttccattgtctgatcactctggctaggacttccaagactatgtggaatagttgtgttgagagagggcatccttgtcttgtgctggttttcaaagggaaatctttcagatgtttggctatgggtttgtcatagttgtctcttattattttggggtctgttccctttgttgcctaatttgttgagggttttttatcataaagggatgttgcattctataaacagcttttctgtgtctgcttttttgttttaaatcctgcttatgtggtgaatcacatttattgacttgtgtatgttgaatcaatcttgcattatgggaatgaagtgcactggattgtggtgagttaactttttgatgtgctgctgtattcagtttactagtattttgttgaacaaaatcgaaaactttttgagtgttgacatgatattcaaaggaaatgcttattgaagtatttctgattttaggttttgggatcaggaatgcccaactagtaagtgtaatgtagatattccaaaattcagaaaagtctgaaatccaaaatattttgtgtccccagcacccagcattttggaaaagagatattctacccatagtataataaacagggaatactgaaagaacaccttccttctgctcagtgcagagtgcactgttcttctctcaaagttcattgcttaaactattccttttgagggtcagttgatgttgatttctgaggtggtaataagatcacaaatgctcacttataggtttttctctctcatttcagccggggaaaatctagatacagcatgggctctttacttttcagaatgtgtatagccccattggtggtatgacactataagtagcatatcttttagtggaacttttaaaaatgtttgctttatttcttttccccagaggaggcaaagaatctctctttatgcccctgctttttgagtcgtgtctgttcaaaaacacacagttccacaagcattccattaagtctgatataaaaatgaaaatgtcctatgttttttaccacactggaaaaaaaaagatgaaacttagagcaggtaatggatttagagtcttcagacttgattcataagacctgaactggctaatagcaccattttttccttcagaataccattttcagggctttctgctttgggaatacagatctaaattatagtaagtacataactttgaagaatttagaactcagcaggagaggtggggagaaggaagacagttatgatagtgagagcatgatgtgaaaagggacatttttccaaatcccagagtttactattgacaaatccatgaagagaatctgcatatttctaacctttgctaagggtgttgagaaatacaaaataaattttgattaaaacctagatccctaatatttcacagtcttctcacaatcaacaaatataaaagtaatagcagatagagcatgagactctgaagaaacactacagtgcattgaatgcaaaattatgcacctgcattgtgcaggagaaaatagtttgggtttaaatcagtcactcagtgatgtaaagattttgaagaactggaagaactacaagttgaattgcaatcatgagccttttctaatcctaaactcaataaaagtgaatgtgaatttctgacctcttgaaatccttcaatgatgatcatcatactgccattttatgaattattattttttaagttctggaatacaagtgcaggatgtgcaggtttgttacataggtaaacgtgtgccatggtggtttgctgctgcacagatcaaccatcacctatttattaagccaggcattcattagctcttttccctaatggtctcccccagctcccatcctcttctctgaccccgttgtttgttgctcccttccctgtgtccatgtgttctcattgttcagctcccacttataagtgagaacatgtattgtttgtttttctgttcctgcattagtctgctgaggataatggcttccagcttcatccttgaccctgcaaaggacatgatctcattcttttgtatggctgcatagtattccatggtgtatatgtgccacattttctctatccagcctatcattgatggacatttgggttgatttcatgtctttgctattgtgactagtgctgcaatgaacacatgcatgcatgtaatatatctttataatagaatgatttatattcctctgggtatttacccagtaatggtatttctgtgtcaaatgatatttctggttttaatctttgatgaatcaccacacactcttccacaatggttgaactaatttacattcccagccacagtgtctcttgaatacaacatactgatgggtcctgtctttttatccagcttgccatattctgtgtcttttaattggggcatttagcctggtggcgacaaaatctctcagcatttgcttgtctgaaaaggattttatttcttcttcacttatgcagcttagtttggccagatacaaaattctgggttggaaattattttctttatgaatgttgactattggtccccagtattttctggcttgtagagtttctgctgagaagtccgctgctagtctgatgggcttccctttgaaggtgacctggcctctctctctggctgcccttaacattttttccttcatttcaaccttagagaatctgatgattatgtgtcttgggattgatcttcttgtggagtatcttactggggttgtctgaatttcctgaatttgaatgttggtctgtctttctaggttaaggatgttctcctggatgatatcctgaagtatgttcttcaacttgattccattctccctatctcttttgggtacttcaatcagtcataggtttggtctttttacatagtcccatagctctggaaggtattgttcattgcttttatatttttttctctaatctcgtctgcctgccttatttcagaaaagtagtattcaagctctgatattctttcttctgcctggttgattcagctattaatacttgtgtttgcatcatgaagctctcatgctgtgtttctcagctccaacaggtcatttgtattcctctctaaactggttattctaattaacatttcctgtaatcttttatcatggtttttggcttctttgcattgggttagaacataatcctttagctcagcaaagtttgtcattactcagtttctgatacctacttctgtcagttcatccatctcagcttcagccctgttgtgtgctcttgctgaagaaatgctgaaatcatttgagaagaaaaggcattccagcttttggaattttcagcggtcttgcactggtttttcatcatctttgtggatttatctacctttaatctttgaagctgttgacctttggatgggatttttgtagggtcttttttgttgatgctgttgttattgttgctttcgttttttgtttttcttctagcagtcagtcccctcttctgcaggtctgctgcaattcgctgggggtccactacagatactgttcacctgggtatcatcgatggaggctgcagaacagcaaagattgctgcctgctcctttctatggaagcttcgtcccagagaggcacttacctgatgcctgttggaactctcctgcataaggtgtctggcaacccctgttgaaaggtctaacccactcaggaggcccaggataaggaaacaactttaggaaggagtctggctatcccttagcagagatggtgcagtgggctgggggaatcccccttgtctggatctctgatactcttcagagccagcaggcaggaaagattaagttggctgaatctgagaccacagccacccctccccacaggtgctctgtcccagggaaatgagagctttgtctgtaaactcctggctggagttgctggaatccctgcaaggatgccttgcccagtgaggagggatggatcccggtcccacctcaagaagcagtctggccatgatctgctccaggggctgtgctgcactgtgaagactgctgcccagtccaatctgcccagcctccctagcactgggaggggaaaaccgcttactagagctgcagtaacagcagtcccccctcccttgaggacttcggtcattttaggcctaatctaagctgctatgctgggtagtggggattctaatccagtggatctaagcttgcaggcttctgtgagagtggacatgctgagcaaggccattttgctccctggcttcagccccctttccatgggtgtggatgggactcctgcctcactagagttccaggagctgctggactgtgtaaaaactcctgcagctcagtgcctgcccaaacagctgccaaccagaacagcagccgtgggtctgcccagttttgtgttgagacccaaggccctgatggtatatgctcacgaggggatctcctgagccctggattgcaaaaattctggaaaaaatagtaccccgggtgggtagcagagtccctcactgcctcccttgcctgaaggaaggaggtccctttgtcccatgtagctcctgggtgaactgccgcccacactgcttctccttgctttctgtaggttgcactaactgcctagatagtcccagtgagaggatttgggtacctcagtttgaaatgcaaaaatcacttgccttgtgtattttcctctgctggagctgcaaaccagagctgtttcttctcggtcatcccttgcctttttctttctctttttacttactgttcttctgcgcatatctcttttgtataatcacacattaattctactacagcttgagcctccttctacaatcagctttcattcaggggatatcaaaaagcaaaggtgaactttcaccctcggtaaaaattaaatgttatgaccatcttagttagtaaaaggaaagcatgccagggagtagagaagagggttctctcagcactatctccaataaaaggttaagaccatagggagacagagaggggaagacatcgtgaggattcatcaacacagtttaagcaggaaatatgaactatttggttaattcttatgaggaaacgaaagaagacttgttagattaaactccttcagtcattgtggttctttgtgatcagagaaagaaaaactgagagatcaggaagagaagagacagatggatagagtaagtaggggggccacaggaaacaaggaaaagaaacaggctgaggtgtcaacccacaggacaatgttttgtcattttctttttttcctcccacaggaagaaactaagttccagtacttggatgtcaacttgctgacgacaaggcacttccttacaatgagcctggaattctaagcagcagtttcacaatctgtaattgcacgtttctgccctttacaataaagaaatacacagtttcctttcatttcttagtctgaggctcttttcaatgctgtaggaaagaacacaggctgttacctatggcaggtgattccttttctgactaggaacttggtagtaggatcttagaaaacacttgatttattgatgtgtaataaacataagaaaggaggtgagccattagcatgcatgctgaattctttttcttactggttgtgcgtagtttgaatcacaggacctggtgttagagatactgaaggagatcatagttttccagaggtcttcgagccagaaagaagttaattcctttctttcagcttctggtaatcaaagggagggtaaagaaaggtagaggaagttatttgtgtgagacaagtctagaagttgcaaaatgcactctgaaatctttctcttgattccaaattaattgcccagatcataaacattcctccccgaatcagacctgagagcctctgaattgttaacctctttgtcatctcttattgtgaattatatccttggtctgtttaaagtgattccatttttacccctttctctggtcgcggtactgactactttaatgcaatatttcataggtaactatcacatttgtgtggttgttgctgttgttgtttttaagtggtctccctctctccaggacttaactctccgatccattctgcacacaactttcgggtctcctgtcttatataacgacgctgaaaaagcctaagggatagtcatgagttacttaggcagccagtattccagcaggtcataacacttctttggcttcattctcctcataggaaaagggagaaattggactagatcagtggattctaaaccttataacatatcacagtaatctgtaatcatatttaaaaagtctgatcactacccccttcctcactctgaatagctcagtcttaaatatcctgcaggcatttattgccttttgaagatctgcagataattcttatggaactgacctggcataggtttgtctacagattagagttattaataaagttgaccagttatttaactctctctgcttatctgctagtgatctattaatgtaattaactttgctcagggacatactgtggctccttattgccttttttaaaaaaaatctgaactttcagacaagtttttctaccttctgaaacatgtgtattcatttctccattagtccctataaagcattatttcagcttcataacaaaattactgtatttacttcactcatatttctttgttgttgagtttctttattactttgattctccctatagagcaattctatccggggtttatgtctcacctcacaacatttaacttaatctccagaatcaaaggatcattagataatagatgggaaaaattgaaagccactagtcaaaaacaagtcatgatctggtaattataaacaactaagtgtagtcagctattgttaccttaaactcctgaggaattgtatcctataatgtgtttaagcattacatcactttaccgggagcctaaactatggtcctgatgagttttttcctctaattgattccttccatttttattaccactgcagctttcattcagtgattattataacaaaaaataatctgtaataaccatttctttaaaaaatacttaccatatgatagctatttaatgtactctctctggtttaatatttaaaaccaatcaatacagttgtgctattattgccatattatagttgaaggggatacttagagaatgccttcaaaatatgctttaggtcaaaagtctgttgagaggagtgatctcaggttggcgtgactctcaaactctgccattactctacctttctgcaaacatcttcaaatacttgccctgcctctgatcactcctacttcagtcctggcttcacatttatattccttctaaagcccagctctcccagttttgtggttataccagacattcaagcctttgtgcttcttcccacactgctctctgccaggataccaacccacagttgttcactggacaaattcctactagtccttctggtttcagtgcccagccctctcttctctggagagctatcttccacctacgacacgctttacctatgcttttattgagtatctgctcattatgtacattcttataaaatgtttcattttacttatttgcatatctatccacttgactgcaagctttaaagtgtacaaacatgtttccaaaatggtacccctaatactagcagagtaagttttaagaaatgatgatcattagatattcctgaatggggctgggcgctgtggctcacgcctgtaaacccagcactttggaggggtgaagtgggtggatcacctgaggtcactcattcaagactagcctggccaacatggtgaaactctgtctctactaaaaatataaaaaaattggctgggcatggtagcacatgcctgtaatcccagctacttgagaggctgagccaggagaattccttgaaaccgggaggcggaggttgcagtgagccgagattgcgccattgcaccacagcctgggcagcaagagtgaaactctgactctctctctctctctctctctctctctctctctctctctctctttctctctctctctctctctctctctctctatatatatatatatatatatatattcctgaatagataggggaatgaatatgccttccttctgcttgaaacttccaatgtgcacttatcatctgttaaatgaaatcaaactcacctggtttgctattaagaatttgttactgttcaatgggttcaccttgcccactgcttagacagagctgatttgttagggtaggggaattgcaatcaggaaacagtaattgactcacagccggctgtgtgggtgatcagagttttgttattacttgaatcagtctccccgagcattcagaaatcagaatgtttaaagataatttggcaggtaagggctagggaagtagggagtgctgattagttaggtgggagatggaatcatagggtgtcaaagtgaggttttcttgctgtcttctcttcctgggtgctatggcagcctggttgagttagattatgggtcggggtggtgtcagctgatccactgagtgcagtgtctgaaaaatatcttaagtgctgatcttaggtttcacaatagtgatattatccccagagcatgttggggacgttcagactctaggagccagaggttgcatgacccttaaattgtaatttttaatcttgtagctaatttgttagtcctgtaaaggcagactggaccccaggcaagaaggggtctttttgggaaaggactgtaatcaattttgtttcagagtcagaccatgaactgaattccttcccaaagttagttcagcctatgcccaggaatgaagaaggacagcttaagtgttagaagcaagatggagttggttaggtctgatttctttcactgtcataatttcctcagttgcaatattacaaaggcggtttcaatcccttcctttgggttttataacagcttaatcttaagatgtaggctatgaagatgggaaaaggctgttgatcacactggcttccatctgctgacaggggacatagtggaaattggagtgaaccccaaggtgagaagactggaactgctttgcaactgccagaccatacttatgcaggcctggctgggcttccaatgcttacatggcaaaaacattagtattgtccttgtaggtttcctacagtattcaagagaacagcctcctgtaaggtataaaacaaatcctaggataaggagtacaattctcaattttaaaaggaaagattctaaaaagaattttaaaaggaaagatttgaaagcactagtttagagacttctaatccacaaatattttgggatttattccaaattgcagaaaaaaaaaactcaaggacagctaacaacaggtgtattatagattttctttcaaagcataatttttctctttccagactcatttttattaagaacaaattatgatagaaataatttgtttacaaaaataagctttagtcttactgtacttgacctgattatttgcataaggtgcaacagataattatttttcagttaggctgttttttgtttaaattggctttgatggaactctgttccatgagcaatctcaggtaagacttttcaagagccgagtccagccatgcgttcgtacactcaaatacctatgagttgggtaaattcctctcctctcaaggtcccaagataaattggagctcctgaacctgttagacagtgatattcttcacttaccagagatcaagaaacttgtacaaggactctgtgtagacaaggtatgaagccagattccccaagggatttcattgtttctatgagtcaacttcgattctttaaaagaagcacagcattccagtcaaagccttgataaaacaaccaatttctccgattgtgtcctgttacaaaaaaagaaaaaaaaaaaaaatcttattgcacttatgcaattaactatgctcccataaattgtgaatacttacaaatagcttccaaattctggagaaatcagatagagagaaacaaagatggttcaaaattttttcaccagagcatattttactcacttgttaaaagttgcaaatagctctaaagaaataagttatcttgactctgaaaacaaaaggattagtgatatttaacatataaggtcttcatgagagtcctagaagtttcattttttcctccattccaatagcacaatttttaaagttatctgacacctgcattcaaagtcctatatctgattataaactgccatttgaaaaggaccaaagcaagacaaaatatctgttgatgacaaaagcctatagacactattaaagttataattgactaggaatttggcttacttctgtggcatcccacaattttacataacaatgataattactaataatgtacactaaataatatcagaattacagaagtttatataaatacacagacagaaaactccgggcttgtaagatttttcatttgccagctttaaattggattactagcttcagggtggagcccttggaggaacagggtcaggaaagcatgcatttttttctgagctaaataagcagccacagctgaagggaaagacagatctccagaattaagggtgtcattttatactggatgcttgatccccaaaaggaggaaaatactaccagagaagacagtgtggtgcttctaccctgcattttgttgcaaggcaacctaaagccaatcagcccattttgaaatcagcccatcccccatgggaatctcatctctcagtcaagggtaaggatgtttccatatcttccaggtgtccaagtgcatgtttctctaatccaagtgtgcaaagagccaagtatgcctccaaaaatactcttggccatccattaaatatatttcctacctagttattacataccaaagctctctcataatgcaaagtaatttctgatccccccaaaactcaaactgtcagataacacaatgcaaaacagaatagagcctttgattttgatagggatctatctactgttaattcctggggtttcgggaagaaaacagagcggtttctttttgtttgctttttgttgttgttttttttccaaaacgaggtctatggtgcctcctctgtttttcccaaggagtcgcaggctaccagaagttattttagggcctctcatgtgtgcattaaaagtggcaagacaaaaaatggaaaaaaataattcagttgactaagaagaaaaaaactcccccctcagataagtagtgattgaatttctatcaatatacgttagtttttttctaatttagaactttatataattggaatcccagggtatgtgttccctcctatatggcttcattcactcataatgaatgcagcagttttttcattcatattattacatatcttagtaatatttcccttttatgactgaacagcatttcagtgtatgtatatagcacaaattatttacttatgctcctgaattggttattgagttgtttccagtttttgacatctccatttttgaggaacagtgggcccttgcaatctagttgctcaatgtttagcttcccaggacatgagactcaaggcttatggttctacatccccagatatatggtctagtcatgatttctgtgtcctggatgccgctttggcatgcttcaactcagtggttcctggctctatctggggaagaaaccttcacgtgaaagttagcagaaaaaataaattaatcagtaaataaatttaaaagcaaatgattggaagagaagtaatttacaggcaatttctgctttctttcatgctacaaatcctcccagtggcaaggagcacaagattgtgctgcaaatggattaagtcattgccaaagtaaagataaaactttgcctgattttctcaccccagaaagtttttcatgcccattgtactcaatttcctgccacttcctcctaagataagtagtgattaaatttttaccactatacattagttatttctaatataaaccttatttaattggaatcacaggatatatgttcctttgtatatggcttctttcactcatcatgaaatcataatgttgtcatccatgttactgcataaattagtatttttttcttttgtgactgaatagtatttcagtgtatgtgtatagcacaaattgtttacttatgctcctgaattggatattgaattgttgccagtttatgacatcttcatttttgaggaaacagtgagaccttgcaatctagtggctcaatgtttagcttcccaggacaaaagactcatggctcatggttctacatccccagatacatggtctagtcatggcttctgtgtcctggatgccattttgtcatactttaactcactgattcatggctctgcctgggggcgaaaactatgtgtgaaatccttaagttaatagagaaaataaaagaatctgtacataaatgtaaaagtaaatgaatggaagagaagtgatgcacaggtaatttctgctttcttccatgctccaaatcctcccactgtcaaggagctcaagattttgctgcaatctgactaggtcattgacaaagtaaagataaaaaaaaaatcatgagaaagccccttgggttaaaagccacatcattttccttctacacagtgcattctagtctaacctaaacacgtttaactcatcgcttagagcacaggaagtaacattggtggcccacatgtcaaaaggtggatgtttttgtgactcctggtccttattctccaaagataacaaggtaatgacacaagaaagtttttgttaaagaaattgataaatgtaaagtactgtctgcattttttttattagtccaacttgcatcaaagaggttcataaaataaattggcctcattgagtttatttctggaattatcaattgaacatgtgcttgcaaagacagagacctcttctggccttctctggcttctcattctacagttttcatgagtcctaaaacattttgtctcccatttctccaattaatttcttattcttctcatcacttgccatatttgcacattctgaatattccagttacatactacataccaggcttcatgtttgtcttcccctcttgtatgtgagagcaagggggaaatgaccatgatatgttttgactgaacccctggctcctagaaccatatcgtccatatatatttgttgagtgaatgactagatgcactgcttgaagagtctaacgaaagataaacttagctggataatctgcaaataattatccttgatttttctaatgtaaaatatttgtattaattatagtaatatcactcattatctgcttaccatttgccaggcaatgttgcatgcattttggacattttgtctcacttaatgctcaatgtgtaggtatgtactattattaaaattatttcacaggcagaggaaccaatgcatagggaagttcaatttcttgcccaagaaatgaagtttaagatgctaagttcaacattctgagtccagagcctgtgctccaggcctctatgaggtaatgttcctcaaaagaaagccatccaggatgggtgggtggctcacagctgtaatcccagcagtttgggaggccaacgtgggtgaattgcttgagtgcagaatatcaaaaacagcctaggaaacatagggagaccttgtctttacaaacataaaaatattatccagccgtggtagcatgtgcttgtgttcccagctacttgggaggcagagctgagagggtcatctgagcctagggaggtggaggctgctgtgagccctgttagtgccactgcactccagcctgtgtgacagaataaaattctgtatcagaaaaaaaaatctgaaaaggaaggacattaaataggaaaagctttaatttttgtgaaaaatgtgttcatttcttgaagtaaaattgcttcacagggacatacatttcccatgactttccctagactgtgaaatgggcccaggagagtaggggttcaaattctctaaaggttgtgttacttttctccatcaagttttctaatgaatgagaaactcttcactgtgtgagtttaattgtacacatactttgtcattcttgtcttattctccaagccgcattcccctcttaccctgacttgttccaaaagctggtgaagaaaatttcccaaagatacactctctgttgcagtctacagttcaggaatgtgattctcactctattaaaaatatgaaaaaataaaaaaaaagacatgcgtatgcatgtgcagtggttgtttcccaataagtgtacacgccctgccaaaaaggtataaaaggaaggtgaaaagaaaggtgaagcatgctttcagtttcagctcacacaagaagggaggagagaaaagcatggccggtgagtcttttactgtcccaaaaacaggtccctgggaggaaagagttgtggaaggcgctggctcttttggaagctataattagtatctgtggaagtttacttgagcagaagtgagggagagggaggagagggaggagagaagaaactagttgactctttcagtctttagaaaggaaaggcaagcccagaaaggaactgaggctttaggagcagcctgctgtcattttgcaatcttatttaaactcttacatcttgtaagtgtggcagaggctacagaattggcacaggaggagtactagcagcagtggttcctaaatgaaatgggctatttctgcttcattactttattattctgagttaaataaacatgggacataagaggatgatctctgctttccagggactgatgtggaaatggtaaactcagtcttcagtccactccatgcacatgtatggagactactgagggaaacaagaaggacagcgataaagtaagaggagggataacccaactgtgaggagggggacatttcactgatgaaatctaaatgaggtcactttctgttgatgacatgagaagaatatgaggctgtgttcatgatgtgagacatccttgtgctccaaacagacatgatcctcctgaagaagagacggctgcttatcaattcattgggtgaaggtacaataaatggcttactggatgaattattggagacaaatgtgctgagccaggaagacacagagatagtaaaatgtgaaaatgttacagttatcgataaggcccgagatttgcttgactctgttattcggaaaggggcacgggcatgtgaaatttgcatcacatacatttgtgaagaagacaggtacctggcagggacgctgggactctcagcaggtaagggtcagtgactcacactcaagttcacctagggcctgtcattgtgactaccatgtgatgtctttactagccatgttaagttgcagaaaacttccttctctctggctttgggcaatatttctgtagcaggggccctattgcatatcccttgactctccttcgtttctgttccttcatcctcagtggccctcttctgattaaagctcatttcctgttctgagtacatggtagctaatttcctgaagctcttgagaactatctaaaaatcttcacactatatgttccactgttcctggtgaggcacaatatttattgattgatttagtatttttgagtccaggctgtacccaggcacttatgtagttgtctgacatgaagttttaagtctgtaattaactacattttgtacttctctccaaaattttgccctccaagaagaataaattatatttcaaaagtggcgatatactcagagaatacactgaatgattatagaaaagtaaggatttcaagttggctttttcctcccgttgcctccttgcattttcttttgagtaagatcacccacttgcctgttatcaggctgtggatcatgctgtgagccctggactgcctccatttgtggccaccttgtgacctgatacagtgcacaggaaatgagttggcccattcctgtgatcccttggacctaccccatggtgaggatgagagttctggtggactcctagttactggtctctgtggtactttccaatgccacttcagaggcagatgttctttcaaagtaaaaggctttttaaaaaaaaaaaaaaaaattttatttttctaagggttagaggaagcttatgcctgtctaagcagacatgggataagtttatgttttcatctatgtgtaataaatatcatatttttctgaaaacgtctctttcattttataccccccaccactctctaaattaaagaccatcttgagcgttatttaatgtcgttcagtcagggttgtgggaggaatctttagtggggagtgttgtaggcatcagggtaaagttttccagagatgataagtgactatttcaatgtccttcttctttttctgctccatcatctggaagtcaccttactacacaagactctcaagtagtaattcctcctaggtaatgctgtttttaaaggaagagcattctttgaaccctgttttctttgacattaatgttgtagaatgaaccacagttaaaggggctatggagaattcccacagagtgatcatataattttctttttgtaatctattctgcttttgtagcaactgtcaaaacagcttcactatctatgtttatattaaaaattcggaatctgtgtctcaaaccctgatcacccaaataagtaccaaacttcatcatttaagcctactgaaatagtccctcacatcttccagagacacctttatctaaacaatatcagagctgaacatgccattcttccacaccttgcttctcttccagttttgtgtaactcggttgttggtgtcaccatcactagttgttcaaaccaagcacttgaaactcatcttggcccctttcctttcacgcatctccaatattcaagccatggccaagttttatgcattcttctcccaaatttggaactgtgtctgcatttctacttctatttcattaaaaaacccctattcatcaagggccctcttctatttagaaacaatttagaggctagaaatgcacatttttttaatcaaggtcaggcattactctattgaatttattaaggttgattaattcatgtatgtatccttaaatattttagagcatgggatattcactatataatgaaatactgtattttcactaagaaaaaatacctcagaaataacccatatatttctattttgtttttttatattgttttcattcttctttctcaagaaaccaaacatttattctatcaaattattattttatagtttactccaatatatccattctaattatttcttccccatgtcaccacacttcatgctgcctttatttgtctaactgattgtataacagtttctcaaccttgttttcaaaattaaatattattttcttgacttaatagtttctaaaagatactccacaaatctagaaaactcatttctatcttgaaacaaagattacattaacttctctaacaagtgatcacattgtcagatggtgttgaacctgtgatgaagtaaaagtttcaagaattttctcatataaactctgtgaaaacatttcctcataggtctgtgcagtcaatgttaagtgctataaatccatctagtgtgctctttgatgttagcatttatcatactattttatattcattctagttcatataattaataatctcctccttccatacatgtacatagtaggaagagatcctgaagaacaggacaagggttcattaacaaaatattcctagtgcttactaccatttccattaataaataaatacaaacataagcatatctctcagaaatttttagtagctttaattaagactgcctcccattaaattttattctatggttcaaatcttttgaaacaaatttatattctaacgatttgatcttacacatttgattgttttctgagcattttatcatgcatggccttgaaaatcttcctttctacatttttatctgcaatatttgtgaaaatactgatcctgaaatatgaaaggagatccctgtattgcacacctggaattctctggctggaaatgtactccattagcagtgaaattactcagcggtgagagatcaggattgtcttcctaagaatgtatttccactttcgtggcttcatccttaggtgaggctgtaagaaacacaaagcagaacaaagagggatgccaatgttcatgatattctttgactcttgcgactcctcaggcagtgccagtgtgggacaaccctgctatgcctacatccacaggctcaggaggaagcgttaagctttgctccctagactaagctaaaaggatatggaaagaaaagttgacagaggtgccatgctcagaacataaggatagagtggggtgaaagatatacttgtggtgattctaaaatgcagtgactttttcttagagctgttctcaatggagaatcttacttctgcttcccttacataaaaaaaaaaattcctgtatcctagaatcccaggtttatagaaacagttcctaactgcacccaattcctggataaataacatcaacaatgacagctattgaatgttcactaacagtggccggtgttctaagcattctatgataatacataatttttaaccttaaaaaaacattttagagatcaagaagctgagacatgggattgttaaatattttgcaaaaagaaaaacaatcagaaattggagcagtcagttttagaattcagtcattcttgcttcaaagcttgtgcatttttcaaaatcctacctatcaacagcaatgaagtcagtagttcacctgccatctgggcatttgcaatttctatgcctactctcgaagtagcactcaattccattagccattttcaatgtatagtccatgggatttggtatcttgatagaattaagaaagggtaaacagtcataaatttgccaggggaatattaaattacagagaataaattactgctcatccaaactgcatttcctacacatttatccaataatgggcaagtcaagccgcacacgtcttgctcattatctgcaacgaagagtttgatagtctttctaaaataacgggagctgaggttgacatcataggcatgacgatgctgctgcaaaatctggggtacaaggtggacgtgaaaagaaatctcactgcttgggtaaggtctattacaccttagagagaatggtcacgcccttcctataactaaataatattagaaagcttggttgtaggaccaagaaatgtaatcttttgataatataaaatataaacttgccatgggagggtgctggatgctacaagttcccttgaaacatcagagtcattcagcataagcctggtttaacttaattgtgaagtgctttttttttgtttagttttttgtttttcatttcgttttcttttgtttgtttgtttaactcagtaatgccacgttctctctacaaggtaactctgaatgacttcctaaaaccccttccttcacctttctcgaaattaagacttaaagtttttttggcactccattgtttgtcatggaattccttaagaaatccttaagtatttatttattggctttccaaggttccatgagagttaattacatagtccaaaatcagtggtatggtctctttcaggaaatgactacagagctggaggcatttgctcaccgcccagagcacaagacctctgacagcaccttcccggtgttcttgtctcatggtgttcgggaaggcatttgtgggaagaaatactctgaacaagtccgtgatatattacaactcaatgaaatatttaaaatgttgaatagcaagaactgcccaagtttgaaggacaaacccaaggtgatcatcttcgaggcctgctgtggtggtgagtgctgatgtccttgagaacaccagacattctaatgctgtcctcatctgtatggatccagggtttttcagtttatgtctgtttattaatgtcaaagaaaacgtagtgtcatcactcaacatgtggcttctgtgaattgtatgactggttggtagatatttgtttcattttcaatcctgagactttgatgtttggttgtttttaaaatttgtttgagtgttagaagaaataagaattgttgaaaagattgttacttgaatgaatgtgtgcatgtgtacgtgaattaatgatacagcaaatatattgataaatatgattgaacagaggctaagaggagaacgttgtcctctcagccactggtagtagtaacaaaccaaattttgtctttccagagaaccatggtgtggtgttggtaaaagattcattatgagtctctgaaaatatatctttaccaactctgggagattttgaggatgatgctattaagaaagcccacatagagaaggattttattgctttctgctcttccgcatcaggtaacaggtttcttgtacacagaatatctttgtgggtgttatcaatagaaaaactcacaaccacccactagagggtagataagtgtacagaactttagataagatttttgaacacaaactaaagctttgttccaagtcatacacacaattctctttatccacagagagcaagtaagcacatcttttcattgagttggtaattaatgaactcctctctgttgcaaaatattttagaactgtgagagataacagagaattaaatggaagacgatccgcgctgtagcacataagaatctgactctgcgtaggaaaggtcctccatgttgagatcattcaatggaccaataggccccgacatcaagtattcacaggagacgagtaggagcagtgttcagcaaagtagaatagcaagcgaggaactttgggcccctaaattaaagtgggttttacctagaagcatgaagtatataaagcagaatatatatgcattattctaaaggtatgctttgcagtaagaatattgctattattgactcatctagtcatttagtactttgtaaactagctccacttttttatccctgggctttccttgaattgctcactaaaatataggaatataaatatcatttttctatggattaaataaattaatatatgtgaattattgcacatgacacagaaagaagtacacgttaaaggactggtgttatttaaaatgtttttatcgtagaacttaatccagttacttttcttagcaaggtttaaataaagatcacttgaatgctttcatccaccttgtatggcagtttcctgagaggacttgcattctcttggtcacctctggcccaaacgcccagcccctgctcaaatagttaaattttctataatattttgtacaatgagatatcttctttcagaagaagtttggttctatattgtcttgaacatgccctgatgtagaactctatattttttcaatgatcaaaaacaatgaaaagacacacaccaaaaacatacatttccagtctgagtacatatagtagactttaacattagacagaactgttctttaatatcttttggtcccagccttccacatgacattcacagttctctatttagctctgtatatagctattttccaaaacccaattccttccctttaacccattctgccttttcctaactctctactaaatttacgactgtgtgaactcagggactatgtcattttaatgcctgcaacatatacagcaccggttagagtataagtaaaaatacactcactgaacttcaaatggattcactaaaattacaatgaagtgtagggaaaatagatgaattccaaaacatgcctcagctggagcagaaatactagagtttcttctctttcttcaggcaagagccagtcttgagatgtgaaatgtgctttatcaactgataatgtttcttggagacatcccacaaagggctctgtttttattatgagactcattgaacatctgcaagaatatgcctgttcctgtgatgtggaggaaattttccgcaaggtagggctctggtggatgctattttcactctacttccctgaatgcttggctattgcaattggaagcatagaaagcagatccagacatgtttatcctccaataatacccttctttccaaaagagttttgaaattctttggagagtgaacaagcctgggagccaaatccaatctattaagacccacaggctcaataaaacaatcatttattttcacccttcccctgacctgcagagacaaatgagcggactctaattcgcctgtgtctccctcatggctattagagccaaccgcagatttaaaaagccccaaggagggtcattcaatgcttagataagcacatggctatacttgttgcagacacaagtactttttgtttttgtcacttattttgctatatttgttgtagtctttttggcatgagtcaacaaacttttcagaaaaaccggtctccagactttcctttctctttcgggttcgactttcatttgagcagccagatgataaagcacagatgcccagcactgaaaggatgactttgacaagacgtttccacctcttttcaggacattaaaataaggaagctgtatgaatatctgagggcaggtatgtgtgtgtggttgggagtgtgggaaggttaaggaaagcgtactgaaagtccattttagtccaggactctaggtctacaggcctagaatttttaatccaaaaatttaaattttgaaatgatctgaaatccaaaactgtgtgagaacccacatgatattcaaaggaaatgcttatagaagcatttcaaattttaggattttggaataaggatgctaaaccagtaaatataatgcagatattccaatatacaaaaatatctgaaattcaaaatatttctggtagcatgcgttttggataagggataatcaatccatagtataatatacagaaaatactgaagtaatgcctttcttctggtcactgcagagcacgctgctcttcttccaaagtttttcttttagactctttctgagtgtcggctgataggaacctagaagtggccgtaagactatgaaccctcacttttagatatttctccccttcacctcagcagggtaacattttaaaatagcatgcagtctttccttttaagattgtgtgtgttctcattggtggtataactttattacttacatttcttttagcaaaattctcttttatgttttttttatcccccccatagataaccaaggcttccttcattctataatggtttttggaattatatctgtttaataatagacttttttgaatattttaataaatttgatataaaaataaaaacgtgtcctcagtttctttccacagtggagaaacagaggttggaaatcagaggaagtattgaatttagaatgttaggcttaattcataagacctgaactgcgtattagcaccattttttcattcgaaaaaccatttgctggggtttctgctttagggatgcagatacaaattaccacaggtacctgacttcaaaaaatttggagctcagcaggagagatggggagaagacagatagttatgacagtgacagtgcagtgtgataagagacttttcccaaatcccacagttcactactgacaaatccatgagtagaacctgcatatttctactctttgttaaggtatttaagagagagaaagtaaattttgaattaactctagacccttagtagttgacagacttcttgcaaaggtaagacagccatcaaaaatgaagcgcttggcagacagtgcatgacaccctgaagaaactctaggatccatggtgtgcgcagtgaagtccctgcatggtgcagataaaacaagtttggggtgaaatcattcactcagggatgttaagatttagggaggattcgaagaactaccatttctcctgcaaatatgagccttttctaatctttaacctataaatcaaagtgaatatctgaccttttaaaaatcttcatagttgaacacattacagacccccttatttctggccttttattaactgtctgggcatatcttttctgtactatcatgcatattctactacaacctgagactatatctgtgatcagtctttgctcagcgagtatcaaaaagcagaagtaaattgtcaccttccgtaaaaattaactgttaatgcaatcttaggcagttgaaggaaagctttcccgggagtaaggggattccttccgaatgatctccaatcaaaaggtaggatgaccaggagatgtggaggagaagacaccgtcatgatttctcagcacagtttaaacaagaaatacatttattgaataaaaaatcctttcgttatttcttttttgttgttgttgactttgttaaatatcagttggttacaggtgtgtggtattattttggcgttctctattctgttccattggtctatgtgtctgtttttttgtaccattaccttgctgtggggttactgtagacttgtatagcttgaagtccaggaatgtgatgcctccatctttgtgaaaagcagtttggagatttaccgaagaactaaaaacagaactatcatgtgaccaagtaatcccattattggctaaattcccaaaggaaaatgtactgtactatcaataagacacatgctttcagatatttgtcaacagcactatccaccatagcaaaatcgtagaatcaacccaggtgcccatcaatagtggattggataaaaataaaattggtacatacctaccatggaatagtacactgccatataaattcaaatattatactttccagcaatatggatgcaactggagcccattaccctaagcaaattaatacagaaacagaaaactaagtaccacatgatctgacttataagtgatagctaaatagtaggcactcatggacataaagatggaaataatagacacagggagcaactagaggaaggagtgaaggaggagggcaagagctgaaaaactatatactgggtgctactctcactacctaggtgatgggttaaatcataccccaaacttcagcatcacataatatacctttttaacaaacctgcgtgtgtatccctgaatctaaaaaaacaattgaaatgaaaacaaaaagtgaaatgtaaactatttggttaattattacgggaaaatgcaaggagactagttaaattttactcattcaggacatgtattttagattagctgaggtagaaaaactgacagatcagaagaaaggatgaacagaaggaggtgtgggggccatggtattcttcatgacaatttgaataacttgtgaagaaaaaaagttctgatattgaagagaaaggaaaagaaaaaatattatgccgaaattgaagacaaagccctcatcttgctagacaatgtgctaaagaaccctgtggctggacaaaagtctatcgagaccctacttaatacgtaccaaaagtccaccagtatgaaaggtaagattggtattttacaatggatatctccatttttttagactctattcaactccaaggcccatgcagtgtcttctgtgatctctctatccttcctttacaaatctgtcattttcattaaacctgtgattgttctttaagggactaccttgccttttgtggggtgggatccagtttccaactggctaaaaggctgagtcctcaggttcagactgttcatagaaataattaatagtagatgctttgtagtaagagatactcaaatctaaacctagattctgtcagtaaagtatatgtcttcctgcatgtatcttaaacgctgtagctgactaatcatcagtcttaccacatataaagcagggacaattccagtcctttttcataagactatgtaaagctagaggcaatataatgccaggcatcacataccaacaacttccaagatattaggcctcatccagaactctctccttggagctccagattcatttagctgtagcagcatattcaacaattccactagagtgtttcactggcatcacaaaatgaatacagctgaaattaaccattttgttttccagaacaaacctgttccacttttaacccttttccatttaagtaaaaagagctaaaatatactaagtttctgccaccagaatgtaactagtttcttcaataattaataggagtaagtactagagatcctggcacatagcagatacgtaattaatatgtgatgaataaacagatgaagtgtatgcatgcaataaagagtagttttcctaattattattaggatgctacaaattggaatttttcagtgtttactcatttctgtgaattaaaaaaatatgattggggaactcctataaaatgtttaaattttataactttttaaaacttttgactgtaagattatattatgagtattattagagtttaaatattctcagatccatgtttttcagggatagacaaaattttccatagaattacactgaaatctgcagccctgaactactagagtttaccaataattatatattatttatcacgtacaattctcatatataatgagcactaaattccaaaatgaaataacctttctgatcagcagaggttgtggcaggaaggaggtagctgcagatacctgcagcaggggtccagtggctccctgcactctatctgcatttggattctccagagtgatggatcccaggacgttttagggtcactagcccagcagaccaggaagcaggttaacaaggctattagaagaggtctaggccttggccaggcctttggatatggttataattctgaggttttccagcagagcattggattctgaagttcaggataagaagaatcctagctatttgtttgtttcatttaacaaaccaacatatatatatatataaaatattatatataatataatatatagatacacacataatatacatatattatgcagtatatagaaatcacagttccaagactgtgatttagtcagagacatagccatgtaaacccctacatgccatggcaattgtttgtctgaccctataccactccctctctttttgtctcaatgtaaagagattccaggggagattcctgagagagtcctatttcattacataacagataagactcaaattgaaatgcttatctaaactcctgatttccacatttctttctgttgtactgctaggctaatagaaactctctttgggcagcaatctgcactataatatttataatattgtaataaaataaccattttcatgctaactttactataggatatgagagaaattttgtctaatttttattttacctaaaatcactttatatatatatagatagatagatagatatacagatgcatatatagatgcatctatatctatgtctctatctctctatctatctatctatctatctatctagatgcataaaggtcattaaaagatgactattaacttaggaaattctccaaacctgtaaacaggaaaacatacccccagacctggaatatatcaggaccctggatgtcttcacattggcagaactttctgaaatgagaaggaggaacatatgtcactgtttaatctatgaagaaatatatgcttagaaggtttggtttccttacatactcttaaaacttgttgcatccccagagatcaggtttttatcatacactttagcaagatatttattctaaaatatcattaaaaacgaatggaaacaaatgattgaaatagaaaaaatacatgaaatataacaaaacaatataaattgtagacaggataatagtactttactcatagttcctatgtcttgattgggtcatgtaaccaaacataaatactatgcctgtccattcttttcatgaaaagaaaccttgttattatatcttagtaaacttttcttctaatttgtatgcatgaattcttttttcttttccagaaggaaggctcaagaatctcccagtttcttgcacaatatcagtcaaaagagatgaatattatatttcacaaggggatagatcagaatgactattacaaacttatccaaaagagatatattatttcctcacattataaaacacaaggtaaaaaacttagtgttggttgttcagcactttggaggcaagacgtccacatttacgtcagaatctcgtacaaatatttgtccctttgaccttggacacagtactattgtcactagacaacatttcttctttgaatagctgatttcaaaatttgttaaaagatatctgaaacccgtttcttctagaaaagttggtcattcacttaaagtttgcttttaaaataccaggatggtacagaaatcaatattctgttaagtgtttgctgtatatatgtatctgtgtgtggtgtggactaggagggaactattactccaaaatggaatgttgtctcatccagttttgtagccacatgtacctattaagtacttaacttgtggctagtggcacatgttgatagagtaatgttttgtataaattataataaatatattattgaaattaattataccttttgtaaatgtgatattacaaaatttaatattgcatgtggaactcacattgtatttcaaatagatagcactctgaacaggtatttatttagtacactcttgcccagacacagtagaaagtccacatggatgaatcagtaccatacagtaaaaccactggaaaaatcaaactgtttttctgaatagaggaaggccaaatgtaaccctaaatcatcaagattttttttgcagaatgatcagaatctgtgattgcattttttgtgtgtggagggatggagggagatttctgctttctttatcagggaattcccttttcttcttcaacaacaatacatttccttaagctggaagttaagcacagctataatccctacaggcaaagaagtctttttcctaggatttctctctctctttctctctgtctcaactttcttaggtgataacctgggtcacagaggcagaagacatcacttatattgtgtgatatcccacagctcttccacaaatcaaagctggaccacctgaatcagcagaatctacaaatactctcaagctttgtcctcaagaagaattattgagaccgtaaagaaaaacctggagagatgctgtgctctgttcatgaaatggacaaaaggagagaatcaattgctttcattaaatgcactatttttaatggggtcttgctctgttgcccagcctggagtgccatggtgtgatcatagctgactgctgtcttgaacacatgggctcaagagattctgcagcctcagcctctcaagcagctaggactacagatgcacaccaccatgccaggctgatcattttaattcttgtagagacatagtctcactgtgttgcccagattgatctctaaatactggcttcatgagatccactgccttcacctcccaaagcactgagattacaggctggagccacagtgccagccataaatgcacaaatacttaaagcactaagtgactgggggtgatgacagtagtaacctttatcatagatgctttcagcaaggaagggttcatatggcttcaaaaagataccaatactcattcaacccatgataaaacgtagattcatcattttttcatttattgattcttgtatctatttgagatatattacaatttcagctatagtcacagaagaaaaatagttacatgatagcatagctgagtaataattatttgtactctggttgaaaagcctagatgtgaagcatatttgaaaaatataattaaagcttaaaaaacagtatgttgatattttttaaatagtacaaatataatcataatatggaaggcaaacaacctctgctatattcatttttactggtgcagatgacatctctcagtttttatgaaatttgatttgaacctgaatataagaaatgtttgagtagatgcagaagaaaaataagaagaaagggagtaggaattattctagtttctttaagattcttgactaatcatccagatatgtcctggttcttgctctgggctcttgagagagaggaaagcagtgtcttttgatagaggttagggaagagggcagctatacgaggttttaaaaaaacaaaattgtgaaacatatggagattgaaaagagactcaggtaatcaaagtcacttcatctccatctcctgcagatcaatctaataaaaaaaaaaacagaaagatctgcaaatacctggctctcattataagcaatacaaagtttgactatctgactccaaggaatggggctcacttcgacatcacgggaatgaaggagctgtttcaaggcctgggcttcttctgccccatacttgatattagatgtgtgattatatgtgtaattaacttagctacagagttttatgagtaaggagagttaagcctagcaattttgtaatatagtaagaactacatgacatgatatatgtagaaaactaattatagttctgttcatacttaaattgctcaataaagataatgatgacaacaatgatagtggtgatgttgatgatgataatgacgcaatttggttgaccatgaaataggaggagtcagccacttgactgtaagtattatttggaaagtatttccaaaaagcagaagtgagggagtggggaagggagatgaaagaaagataatattccaaaaaaatgcaataatgaattcattactgctctgagaaactgggttccagtctttcttcaggattgtctacaattatgtagattctaccttactagaagatgaggaattagagacattcatcaatggactaatgccattcattggttgaaattagcccccaggagaaggtcctccctctcctacaattctggacccacatatgcacagctaaacagtcctcagtcctttgatgaacatcttcgatcttcaaagcagaaagaacctgaagcacagtggcttgatgtgtgacaacaaccacatgagggggagtccccactacaacagcactaaagtcaggagggttgaagtggtgtgttatgtgatgacaatgatttttctgagttacatagtgaaaataaacatcacatactacattgcttatgaaacttatgttgcattatttatcccttaaatttcctttcttttcttaatcaatatagttattacatccttttaccctcccgtctcccttgaaatagatacatttactcaatgttttgaaatccttgtggaaaaatgctgttgcttttccttacaaaaaattttctcgtatgtaacatatatttttctagcattacagatatgtgaagaatcatattgagataagaggtaacattactacatttgtgctgttcaataggtattattgttcttcagacattaaatttaatccaacaattctccaaggcaggtagttgacagatagagaaatgagacttgaagtcaatgatcatacaaatcattatatcagtgtaaattggtgagattaataataatttttaataataatcttaataaaatttacagactgtaagtctaatctcaggtctcccaggcagaggccacaaataccaacaccatataggcttggcagagaacacacattaagttaatcaggttaggtgaacgcaggaaaaatcagaaggcataatgaatgcgtcatcaaggactcagtaccaggcaaccctttccatgttgaaattcaagcaacagaggcctggaatgaaacactttatttgaaatcttacaattttttacctctgataattaattcaatgtcaagataaatcacatctgagagagccaaagaaatatcactgggcttatgatggactctgtgggtcaccagtttttacttctgttctagcacatgtggttgttgttccattttcagattatagatccatgaggtgaggttgctcctcactccattggctaagtcatcaatctctctgagaatctgttttctcatctgcaaaatggaactaataatacctgtattcatttcctagggctgccatgacaaatcaccacaaacagggaggtttaactggaaatgcattctctcagttttggaggcaagaagtttgaaatcagggtgtcagtagagtagggccatggccgccatcctaactactggttgcctcaatcaatcttggtgttccttgtttgcagctacatcactctattctctgcttttgtcattatattgctgccttccctctgtgagtctgtgtcttcacatgttgctcttcctgtctgtctttgctccagagccccttttctttggtatgaacatgagttgttccggctgatggccctacactaatccaaaataaactcattgtaactgattatatttgcaaggaccctatttcctaataagagcacattctgagtaactggggtgtaggccttcaatatgtttttatggtacacaattcaactcatcacaatgccgaactcagagggctgttagaaagcagttattctttgaagttatcctattacagatacattgtgcttcttcaatcagtggacacatatttttccccagttctgaaaaatttgctttaaatattttgtcttttctattctctctcgtctgtctttctggtaagttgatcagctatatctcagagtttctcattccatccttcgtacctgtgaagccttctcaaatttttcagcctctcatttctgctttgattttgcaatctagataaattagtattaacccataaacaacaagtatctgaaatgccttggtctgcttatacatgcattttataaacatataaacatattggaaaaatttaggagatttgctacaatttgaagaaaatcacaaatcatctacactagaaatactgaaaaattaagttaggtatgtaaaaaatgcacaaaatttatggagttgttaagtctattttatcatttactactatattataaaatatacacaaatctattatagaaagctaaagtttatcaaagtttatgcactcatagataaaacatagtaccacttgaaaagagaaatgtaaacaaatataaagatacagtattaaatcctaactgcacaaaattaaccatggatactgtactcccatattttcatagccatttcctgctgctatttcagtgaactcaagttttgtatctgcttaaaatgccatgtgacactcattatctctacatcagcagtttgtatctccagtaaatttcatattgctataaaaagcagtatccttgggtttttaatgtatttttcgttgcatttactgcaacaccataattctcgaataacagcacggggtccagacaacataccaatactgatggtgtaatgttcccaagaagcaatgtcatgacattacaagaaaaagtagaactgtttgatatgtactgtagattgagatctggatttgtggctgctcaccatttcaagataaatgaatacagaatgaagaccaatgtaaaaaaataaaaggagataataaagctatcactgcactgtgcctgccagtgccaaaaccttgcactattgtgaaacaatttttaatcttgtattgaaattgaagggtgtaagtggtggcagaattttcatatgaaaggtatatttatagactctaatatgattccagaaaaaatgaagttattttatacaacttaaaggaaaagaaaggggaaggatctaaaggtggatactttaatgatagccaaggatggtttgataatttaaagtgcttttgcattaaaaatgtcaagacatcaggggatgcagcttttggttatcaagaggcagcagattggttcccagaaactattaagaaaatcattgaagagaaactatactactggaacaggttttgaatacaggtgacaatgttctagtctagaaaaaaagatgccaaaaaggccatttgttagtaagaaatagaagcaagcacaaggatttaaaatagaaaaggataagctaattttactgtttcatgggaatgcagtcaggtttatcatcaggactgctcttatctataaagctactaagccctgagccttgaacagaaatggtaaacactagctgccagtgttttggttggacaacaagaatgcctgtgcaatgggagcactttttctctattgattcctttcatgctttgtccctgaagtcagaaaatattttgccaataagggactgcccatttatgattcttttgatgttggacaatgcccctggctacccaaaacctcattagttcaatttgcaaaaaatcaaagtggtctactcgccaccaaatgaaacgtctctaattcagcctctgaatcaggaggtcagaaagaactttaatgctcattacacatgttactctatgaaaagatttgtgaatgccaaggaagagaccatcgatagagatgacatcatgaaagtctggaagggctacaccactgaaaatgacatcattgatattaaaaaattaaaagccatgattttgggtgcagtggtatgggcctatgatcccagctactaaagaggctgaggtggaaggatagcttgagtccaggagcttaaggccaacctaggcaacataacaagaccccgataaatttctgctagagaaaactgtttccagaagttgtccatgacttcaccagcgtttatgaaaaagccaatcaagaaaataatgagagattgtagatattgcaaaaaaagtgaataactttaagatatggatcttataaaaattcaagagctaattgcacattagagaaattaacagatgaaaacttgatagagatgtgtgcttctgaaccagttccaaatgatgaggaagaagatgtagaagaagtagtgccagagcacaaattggcattataatttggcagaaagattctgatttttcaaagcagcttttgacctgttttacaacaaagaccattctatgatatgagcactgaaactaagggaaatggtgaaagaaagattcatactgtctagaaaaaattttagggaaatggaaaagcaaaaatgtcagacagaaataactatgcatttccacaaatataaatgcagtgtgccttcttctcctgtgtcctgttccacctcttcttctgcttctgccacccgtgagactgcaagactaagccatccccttcctccatctcttcagcttactcaatgtgaagacgatgaggatgaagaccttatgataatccactctcactgagtcaatagtagatatattttctcttccttatgattttcttaacaactttttttactttagcttactttatattacagtatataatacatataaaatacaaaatatttgttaatcagtggtttttgttactggtaaggcttctcttcaatagcaggccattagaagttaagtttggaaggagtcaaaagttatatgcagattttcttttcttttctttttttttttttgcgaccgagtctcgctttgtctcccaggctggagtgcagtggtgcgtactcagctcactgcaagctccacctcctgggttcaagccattctcctgcctcagccttctgagtagctgggacaacaggcacccgccaccatgacgggctatttttttgtatttttagtagagatggggtttcaccgtgttagccaggatagtctcgatctcctgacctcctgatgcgcccgcctttgcctcccaaagtgctgggattacaggcgtgagccaccgcaaccggccacagattttcaactgaatataggggtcagtgcctctaagtatttcattgtttaaaggtcaactgtacatctctgtatcttccacattatatacattttcgcagatttgtgtgtctgccttttaatctgtccattattaaatataactaatttttgtatttatacatgctctatttttattgtttctcaaattattgcttattatagaataattactttttgctccctttatttacatccttctatatttgatatagaatgatttcattctatatttgatatttgatttgtccaatatctcaatgtccttcaagatttaaatttatagtctcttctttctgctgatatatccttatagtggcttgctttctagtgtatttatatacttcatctgtcagtgtagtttatattctgagtgggctgaaggaaaagaatggcttctgtttctgctgctaggcaacacaccacatccaagaccatgtctatccctccttggggatttggctctatctggttccaagatgagactctaacttgtagaggttccatgggtcagttattatctatgctgttggtgtagaaatctgacacaaggagaccacacccctcctggccacttgcctgtccaggcaagctctttactgcttcatcttcgctccttcctactcttctgcagcttctttctgtagtcagcaccaactcccagacattcttaccccttctcctgtctccaacactcagtccaatcaggacccagctcctggttcacatggtaccagcaatgcctcaaagaacatgtcctattaaattctggatgtggcagtgcatgaagtctcaagggtgagggtcaggatgagattttggtttcataatctggggttattccaagtaccaatatttttaaacggttcgacaagaggaaccaatatagatgaagtatctattacagagcctgggccttattaagcactcaatatgaaatagttactttagaagcatgttaacgtgactctcctacttaggaagctgcaatggtttcctattgcccatctcatcatttaaatagtttactggggctgactgttataaattatcatagtctagatgcatttaactcagaatttatttcccactgacacaaaaaagcaccttttatctgcttatctacttcctatttcccagtgtagttagtacccagttgaagaggagtgcatcacatacagcaagtaatgagtgaggtggtgggctggcttctcacccagttctccagcttgggcttaccaaggccttgaagcaattttttacctgatcttcctatcataaaatgaaattaatgcttattcaacatactgaagtgaagcatatgaaaaatttagaagtacttaaccaaaaagtacatttgtacatgaccttgcttctgctctataggtcatgactaccataaatgagaggtactatggcatgatctctacacctggcattgcatcctagaaggtaagaatgattaggaggccccttctatacacgagaacacagaggctgagagatgttaaataacttgtccaaaatctaatagctcataaacagaagttgacctcaggactgttagatacccaagtccacactgataagctgtgcagaaaaggggaaggttttagacaaagaaaacataaaataacatgttatagttgattagtgttctgaattgtattactcaaaatgtgctaatggtccacaaatataaataagaagaggagttggataaactgaaagggtatatgatgttctaaagcttggaaatgggatggtcaaaacccaagcacaggaattttctgtcttctatgtcagaggttcttatagtacctactctgtcatttaaaataatattgtttcacagacttcacactgatagaaggatttttaaatcattatgcagattttaaatatcacttacagtagaattgctacattcatttattttaagataattttacttacgtaatgctattttccaggtacatatttcagtcaataaattggttcctgtaggttatctcccctctgtctacctatccccctccaatgtgggtggcgggtaattacatttcagccactatgagaactgcttcctcttaccagaattatgggtaatttttggaggcttgattgtgtcctgaaatcaagaaaaaaaatgtttttccaaattagtctgttattactaccattgacctttttcatttcaaattttaacattattttagtataatttacataaaagaaaatgtaccccttttaagaatataaattgattattaattacacaagaatatttagtataatatcccatttaatagacaaaccgatattgtcaccccaaaaaattttgtcttgccctttgttctcaatttccttccatttcctcctctgataagcagtgattgaatttctaccactacacattagatttttctaatctagaactttatataattggaatcacagggtatgtgctccttcctatatggcttcttccactcataatgaaagtataagtttttcatccatgttattgcatatattagtaattttttccttttatgactgaatagtatttcagtgtatgtgtctagcacaaattgtttacttatgctcctgaattggaatttgagttgtttccagtttttgacatcttcctttttgaggaaatagcgagcctttgcactctaatggctcagtgtttacattcccaggacatgactcaaagctcatgattctacatccccagacacatggtctaatcattgtttctgtgtcctggatgccactttggcatgcataaactccgtggttcttggctctggctggtggggagaaaccctcatgtgaaacccttaagcagcagaaaaaataaatgagtcagtacataaatttaaaagtaaataaactaaagagaagtggtgcacagacaatttctgctttcttccatgctacaaatccttccagcggcaaggagctcaagattttgctgcaatcggattaggtcattggcagagtaaagataaaaacaccatgaaaaacaccttagattaaaagccacgtcattgtcctcctacacagtccgttctacttaaccaatgacatttaactcttagcctggagcacaggaagtaaaactggtagcccacatgtcaaaccgtaaatatttttgtaaatctggtcattatcctccaaaggtaataacgtaacagcccaagaaaatttttggtaaaaaaaaaaaaaaatgataaatgaaatgtaccgtgtgcattttgctattagtccatcttccatcaagtttattcatgaaataaattagccacattgagtttatttctgggataatcaattcagcatgtactgacaaaggcagagacctcttctggccttccctggctcctctgtgtacaattttcatgagtcctgcaatactttgtctcccacttctccaattaatttcttattcttctcatcgcttggcatattttcacattctaaatattccagttacatattacataccaggtttcatgtgtatctttccctcttgaatgtgcgagcaagagggaaaggatcataatatatgttttgatggaacccctgacaccgagaaccatgttgtccacatatatttgctaaatgaatgactggaggcactgcttgaggattctaacaaaagataaacttagctaaaaaatctgcaaataatcatccttgattatttttctaaactgaaatatttctattaattatagtaatatccctcattatctgcttaccatttgccaggcaatgttccattcatttttcacatttttatctcaatactgctcaaaactgtgtagatgtgtatgtactattaataatattattttacagacagaggaaccaatgtataaagaagtttaatatcttgcccaggaaggtgagtttaacttgctaggttcaacattctgagttcagagtctatgctttgggcctctgtgatgcaatgtccctcaaaagaaagccatccaagatgagtgagtggctcatggctcatgcctgtaatcccagctctttgggaggccaagatgggcggatcgcttgagcgctggaattcaaaatcagccaaggaaacatagggagagcccgtctcaacaaaaaatacaaaaattaaccagccctgatgggatttgcctgtaattttaactactcaggaaactgaagtgggagaatcatctcagcctagggaagtggaggctgcagtgagccgtggtcatgccactgcactccaacctgggcaacagagtgacatcatgtatcagaagacaaaacaaaacaaaaaagccatcaggaaaggaagaacattaaataagaaaagctttaatattggtgaaaaatgtttacatttcttaaagcaaaattgcttcacagggacatatatttcccacaaactttccccaaagctgtgaggtggggtcaagggaacagtggttcacattctccaaaggttgtgttaattttttcggtcaagttttcgaatgaatgggaaactcttcactgtgtgaatttaactgtacacatactttctcaatcctggggcttattctctaagccccattcccctcctaccctgatctatccaagggctggagaaaaaagaattcccttggatacactctctgatgcaggctacagttctgattctttctctgggaagaaaaataaagatatgcatatgaatgtgcagtgggtgtttcccaatatgtgtacacgccctgccaaaaaggaaggcgaaacatactttcagtttcagcccacacaagaagggtaggagagaaaagccatggccggtgagtcttttactgttccaagaacaggtccctgggaagaaagagttgtggaaagggctggctcttctggaagccataattagtatctgtggaagtttaggtgagcagaagtgagggagagggaggagtgggaggagagaaggaactagaagatttttgcaggctttagaaagaaaaggcaagcccagaaaggaacagagactttaggggtagcctgctgtcattttgcaatcttaattaaacccttgcttacctgtcgtaagtctgacagagggtacagaattggcacaggaggagtactagcagcagtggttcctaaatgaaatgggctatttctgcttcattactttattattcagagttaaataaacatgggacacaagaggatgatctctgctttccagggactgatgtggaaatggtaaactcagtcttcaggtcactccatgcacatatatggggactactgagggaaacaagtaggacagcaatacagtaagaagagggattacccaactgtgaggagggggacatttcactgatgaaatctaaatgaggtcactttctgttgatgacgtgagaggaatatgaggctgttttcatgatgtgagaaatccttgtgctccaaacagacaaggtcctgaaggagaagagaaagctgtttatccattccatgggtgaaggtacaataaatggcttactggatgaattattacagacaagggtgctgaaccaggaagagatggagaaagtaaaacgtgaaaatgctacagttatggataagacccgagctttgattgactccgttattccgaaaggggcacaggcatgccaaatttgcatcacatacatttgtgaagaagacagttacctggcagagacgctgggactctcagcaggtaagggtcagtgactcacactcaagttcacctagggcctgtcttcgtgcctaacatttgatttctttactagtcatgttaatctgcagaatatcttcttatctctgcctttgggccatatttctgtagcagaggccctattgcatgtcccttgactcttttttgtgttccttcatcctcagtgccctcttctgattaaagttcattttctgttctgagtacatggtagctaatttccttaaggtcatgagaactatctagaaagcttcatacaatatgttccagtgttcctggcaaggcacgatatttattgattgatttattattttgtgtccagggtgtccctaagcccttatgtagttgtttgacatgagctttagggtctgtattcaaatactttttataaattcttttcaaacttttgccctcagagaagaataaagtatatttaagtgacgatgatacgttcaggaaatacattcaatgattacagaatagtaaagatttcaacagggctctttcctcccgttgcccccatgcattttcttttgagtaagatctgcttgtctgttgccaagctgcagatcatactgggaggcctggacttccatcatctgcagccctcctagggcctgatacagtgctcaggaaatgagcttgcccattcttataatcccttgaacctacagcatggtgaggatgggagttttggtgcacttgaacattatttattgtcatttagtcagggttgtgggaggaatttgcagtgaggagtggcttatgcattgctgtaaagttttccagagatgataagtggctatttcaatgttcttcatctttttataggtccgatacctggaaattagcttagtacacaagactcccaattactattttcttccttcccaggtaatgttgtttttcaatgaagagcattctttgaaccccatcttctttaacattaatttagtggaatgagctctgcttgaaggggctatggagaattcccatagactgatcatataattttcttttttaatctattctgtttttgcagaaactgttcccaaagctttactactcttatttatactaacaaaatctgaatttgtatctcaaattctgattacccaaataagtaccaaacttcatcatttaagactactgaaatattccctcacatcttccagagacacatttatgtaaacaatttcagagctgaacatgccattcttccccaccctgcttctcttacagttttgtgtaacttggtttttgatgccaccatcaccagttgttcaatccaggaacttgaaactcatcttggcccccttcctctcatgcacctccaatattcaagccatggccaagttttatgcattcttctctcaaatttggaaatgtctcttcattcttacttctattattttattaaagaactcttattccttaagtgccccccttaaaataaaagaaacttatatttgaaagcaatttagaggctagaaatgcatgtttttatcaagttcagatattactctactgaatttattaaggatgattacctcatgaatgttttcttaaatgtttcacagcatgggatactcactatataaccaaatactgtattctcaaaaataactcaaatgcttttctttagtttttctctattgctttcacaaatccttacaaagaaaccaaacatttcttctactaaattattattttatagttttctccaatataatcattctaattagttcttctccatgtcaacacacttcatgctgcctttgtttatctgattgtatagcagtttttcaaatttgtttgcaaaattaaatattattattttgccttaatagtttctaaaagatcctctggatatctagaaacctcagttctatcttgaaacaaacatcacattaattttttaacaagtgcatcacattgtcagattgtgttgatcttgtgatgaaataaaagcctcaaagattttctcacataaactctgtgaaaacatttcctcatatgttcgtgaaagcaatgtttagtgctatgaatccatctagagcacaccatgattttagcattcatcgttctattttatatttattctagtttacgtattcaatattcttgtcctcccatatgtatacattgtaggaggagatgctgaaggacaggaaaagggatcattaaaaaaatattcccagtgtttactaccatgtctattaggtaaataaataaaaggataaacacatattttaaaaattaattagtgttaattaagacctgctcccattaaattttatcctagggtttgaatcctttgaaaacaaatcatattttaactattttatatcactcattgactgtttcctgagtgttttatcatgcatggccttgaaaagcttcctctctgtttttatctaagatgcttgtagaaatacttatgctcaaatatgaaagtagatcctccctgtaatgcatacctagaaatctctggcttgaaatgtgctccattagcagcaaacgcactcaactatgttaatgactagattaggattgtcctctaggaatgtatttcctcttttgtagcttcctccataggtgaggctataagaacaaagagggataccactgttcatgatattccttgtctcttgcagctcttcaggcagtgcaggacaacccagctatgcccacatgctcaagcccagaaggcagaatcaagctttgctttctagaagacgctcaaaggatatggaaacaaaagttgcagaggtgccatgttcagaatacaataataaagtggagtgaaagatatacttcaggcagttttgaaatgcagtggctttttcttagaaccaattttattgagcggttctggaggaacatacttctgctccccttgcataaaggatctctatatcctagaatcccaggtttaggtaaagagttgcaaactggaactcataaattatcatagtcttcacccagtctgtctcttagaatttatttcccactgacacaaacaagccattttgtctgcttgtataacccagattttccagtgtagtgcccagttggaaaaaagcacatcccattgagcaagtattgaagtggactcttgcttctcacccaattctccaacttgtgtttaccaagaattggagtcagttttttacctgttgttcctattcataaaatgaaattaatgtttatttaacatattgaaatgaagcatatgaataatttagaagcactttaccaaaaagtacattttaacattaccttgcttctgggctatagcttatgactactataaatgagaggtatagtggcatgctctctacaccaggcattgcatcttagaaggtaagaatgataatgaggcccctcctatacatgagaacacggaggatgggagatgttaaataacttggttaagatctacagctcataaatagaagttgaccctagggctattagatgccaaagtccacactgataaaccgggcagaaagaaagaggcttttagacaaagaaaaaataaaataacatgtaatagttgattagtgctctaagttgtattacacaaaatgtgctgatagtccaaaaatataactaagaagagttggataaactgaaagtgtccatgaacttctaaggcttggaaatgggatggccaaaacccaagcacagaattgtctgccttctatgtcagagatttttacagtacctactctgtcatttaaaattatattgtttcccagacttcacactgacaggattttataacattatgcacatttaaaatattacttataatagaattgttacattcatttattttgagatgattttacctttgtaattctattttccaagtacacatttaagtcaacaatttggttcctataaattatatccactctgtctacaattccccatccaacttgggtggttggtaattacaactcagtcactataagaacaacttcctcttaccaaaatttttacaaatttgtggagtgtgtccagccagaaatcaacaaaaaaatatatattattacaaccactgaccattttcgcttcaaaattttaatgttatttttgtataatttacgtcaaagaaaatgtactccttttaagaatacaagttgataactaatgatacatggctattctagtataataacatcctagtgaataggcaaaccgattttgtcaccccagaaagttttgtcacgcccattgttatcaatctccttccacttcctcctcagataagtagtcatcgaatttctatcactgtacgttagtttttcctaatctagaactttatataattggaatcacagggtatgtgttccttcctatatggcttctttcactcataattgaaacatatttttttcatccatgttattgcatatattagtaatttttccctttcatgactgaatagcatttcagtgtacatgtatagcacaaattgttattttatgctctggaattggatatttatttgtttccagtttttgacatcttcatttttgaggaaacagtgggcccttgcaatctagtggctcagtgtttagctttccatgacatgagactcaaggcttatggttctacattcccagatatatggtctagtcatggcttctgtttctgggatgtcactctgacatgcttcaactcagtggttcatggctctggctgtgggcgaaaccctcatgtgaaatactttagttaatagaaaaaaaattgaatcatttaaaagtacatgatgggaagataagtaatacacaggcaatttctgctttcttccatgctacaaatcctcccagtggcaaggagcacaagtttgtgctgccatcggattaagtcattggcaaagtaaagataaaacaccatgagaggttgggcatggtggctcacatctataatcccagcactttgggaggccaaggtggccagattacgaggtcaggagtttgagaccagtctggtgaacatagtgaaaccccatctctagtaaaaatacaaaaaattagccaggtgtggtggtgcctgtaattccagctacttgggaggctgaggcaggagaatcacatgaacccgggaggcggagatggcaccattgcactccagtggggtgacagtgcgagactctgtcaaaaaataaaaaataaaaaaaaaaaacgatgtcctcctacacagtgagttctagtcaaacccaaacacatttaacccttcacctagagcacagaaaataaaactggtagcccacatgtcaaaaggtggatgtttttctaactctgggtctttaatctccaaaaatattaaggtaacaaatcaggagaatttttggtaaagaatttgataaacgtaacataccgtgtgcattttgcaattagcccacctttcatcaaatagatttataaaataaattagccacattgagtttgtttctgggataagcaattgaacatgtgattgcaaaggcagagaccttttctggccttccctggctcctctgtctaaagttcatgagtcctgcaatattttgtctcctactttgccaattttttttttatcattctcatcacttgctacatttgaacagtctgaatattccagttacatattacataccaggtgtattagtctgttctcatgctgctaataaagacatacccaagactgggtatttataaagaaaaaaagaggtttaatgggctcatagttccacatggctggggaagcctcacaatcatggtggaaggcaaaagaggagcaaggacacatcttccatggaagcagacaaaaaggcatgtgcaggggaactcccctttatgaagccatcagatctcatgagactttttcactatcatgagaacaacatgggaaaaacccacctccatgattcaattacctcccaccaggtgcctcccatgacaccaggggattattacaatttaaggtgaggttttggtggggacacagagccaaactctgtcattctgcccctggcctctcctaaatgtcatgtgctcacatttcaaaaccaatcctgccttccaactgttcctcaaagtcttcactcattccagcattaacccaaaagtccaagtccaaagtcttctctaagacaaggcaagtcccttccacctatgagcctgtaaaatcaaaagcaagttagttacttcctagatacaacggggatacaggcattgggtaaatacacccattccaaatgggagaaattggccaaaggaaggggctacattccccatgcgagtccaatatccagtagggcagccaaatcttaaagcttcaaaatgatctttgactccatgtctcatatctcggtcatgctgatgcaagagtcggggtcccatggccttgggcagctccaccctcgtggctttgcagtgtacagcatccctcctagctgctttcatgggttggcattgagtgcctgagtattccaggtgcatggtgcaagccgtttgtggatctaccattttaggatctggaggatggtggcccttttctcatggctccactaggcagtgccccagtgaggactctgtgtgggagctcacaccccacatttcccttctgcattgccctagtagaagttcttcatgagggtcccacccctgcagcaaacttctgcctggacatacaagcatttccatacatcctctgaaatctagacagaggttcccaaacctcaattcttgacttctgtgcccctacaggctccacaccacatggaagctgccaaggcttggggcttgcaccctttgaagtcacagcccaagctatttcttggccccttttagccatggcttcagtggcccgggaagaagggcactaagcctttaggctgcatacagcagaagggccctcggcttacctcatgaaaacatttttttccctcttaggtctccagtcctgtgataggaggggctgcctggaaggtctctgacatactctggagacatattccccattgtcttggagattaatgtcttagagattaacatttggctcctcgttacttctgcaaatttctacagttggcttgaatttctccttagaaagtgggttttgctttcccagcacatcatctggctgcgaatgtttcaaacttttatgctctgcttcccttttaaacataagttccaattccaaaccatatctttgcaaatacataaaaatgaatgcttttaacagcacccaaatcacttctggaatgctttgctgcttagaaatttcttctgccagatgccctaaatcatctctctcaagttcaaagttccacagatctctagggcaggggcaagatgccaccactctcttcactaaaacgcagcaacagtcacttttattccacttcccaacaagttcctatcttcattcgagatgagcagcatttagtcaaagccattcaacaagtctctagaaagttccagattctattttcctatctttctctaagccctaagaactgttccaacctctgcattttacccagttccaacatcgcttccacatttttggagatctttacagcagcactccattactcagtataaatttactgcattagtcatttctcacactgctaataaagacatactcaaggctgggtaattatatagaacaaaaaagatatttaatagactcacagttccacatggctggggaggcctcagaatcatagcaaaaggcaaaagaggagcaaggacacgtcttacatgggtgcaggcaagagggtatgagcagaggaattcccttttataaaaccatcggatctcatgagacattcattatcaagagaacagcatggaaaaaaaacagcacccatgattcaattacatcccaccagatacctcccataacacatgaggattattacaattcaaggtgagatttgagtagggaaacagagacagaccatatcaccagccttcatgtttgtctttccctcttgaatgtgagaccaaaggggaaaggaccatgatatgttttgactgaacctctggcacctagagcaatgtcgtccgtatatgtttgctaaatgaatgactagatgcactgcttgaggattctaacaaaagataaacttagctaaataatctgcaaataatcatccttgattatttttctaaccttaaacatttgtattaattataataatatcactcattatttgcttaccatttgccaggctatgttccatgcattttccacattttctctcacttaatgctcaaaactgtgtaggtacatactattaataaaattatttcacatacagaggaaccaatgcatagggaagttcattatcttgccaaggaagggaagtttaaaatgctaagttcgacattctcattccagagcctatgctctgggcctctacaatgcaatttccctcaaaaataaaccctccaggatgggtgggtggctcatgcctgtaatcctagcaatttgggagaccaaggtgggcacattgcttgagcctgggagctgaagacaagcctaggaaacacaaggagaccctgtctttacaagagatacaaatattagctggccatggtggcatgtgccagtaattgcagctactcgggaggctgagttggaagaatcatctgagcctgggaagtggaggctgcagtgagccaaggtcaaataactgcattccggcctgcacgacagaatgataccctgtatcagaaaaaaaaaaaaacagaaagaaaaaagcaatgtgaaaagaaggacattaaataagaaaagctttaattctggtgaaaaatgtttctatttcttaaagcaaaaatgtttcacagggacatacattacccacaactttcccaagagctatgaggtggggtcaggggaacagtggttcacatactccaaaggttgtgttacttttctccgtcaagctttctaatgattgagaaactcttcactgtgtgaatttaattgtacacatactttttcaatcctgtcttactctccaagccccattcccctcctaccctgatctatccaagggctggtgaagaaaatttcccatggatacactacctgatgcaggctacagttctgattctttaatgggaagaaaaataaagacatgcatatgcatgcacagtgagtatttcccaatacatgtacaggccctgccaaaaaggaaggcgaagcatactttcagtttcagtcacacaagaagggaggagagaaaagccatggccggtgagtcttttactgttccaagaacaggtccctgggaagaaagagttttggaaggggctggctcttctggaagccataattagcatctgtggaagtttacttgagtagaagcaaggaaaaggggggagagggaggagagaaggaactagaagattcttgcagactttagaaaggaaaggcaagcccagaaaggaactgaggctttaggggaagcctgatgtcattttgcaatcttaattaaactcttacttacatgttgaaagtctgacagagggtacagaattggcacaggaggagtactagcagcagtggttcctaaatgaaatgggctatttctgcttcattactttattaaccagagttaaataaacatgcgacataagaggatgatctctgctttccagggactgatgtggaaatggtaaactcagtcttcaggtcactccatgcacatgtatggagactattgagggaaacaagtaggacagcaatacagtaagaagagggattacccaactgtgaggagggggacatttcactgatgaaatctaaatgaggtcactttctgttgattacatgagaggaatatgaggctgttttcatgatgtgagaaatccttgtgctctaaacagacaaggtcctgaaggagaagagaaagctgtttatccgttccatgggtgaaggtacaataaatggcttactggatgaattattacagacaagggtgctgaacaaggaagagatggagaaagtaaaacgtgaaaatgctacagttatggataagacccgagctttgattgactccgttattccgaaaggggcacaggcatgccaaatttgcatcacatacatttgtgaagaagacagttacctggcagggacgctgggactctcagcaggtaagggtcagtgacttacactcaagttcacctagggcctgtcttcgtgcctaacatttgatttctttactagtcatgttaattggaagaaaactttcttatttctggcttcagggccatatttctgtagcagggtccctattgcatgtcccttgactctcctttgattcttttccttaatcctcagtggcactcttctgattaaagctcatttcctgttctgagtatgtggtagctcctttactgaagctcttgagaaccatctgaaaagcttcatgctgtgttttccagtgttcctggcaaggcaaaatatttacctgtggatttatttttgctgagtgcaaggggtctgtaggcacttatgtagttgtaaagtcacatgaagctttaaggtttataatcaaatactttttataacttttctccaaaattttaccctcccaaaagaataaaatatatttcaatgatggcgatacactcagagaacacattgaacgtatagaaaagtgaagatttctaatgggctcattcctccagttgcctccttgtattttctttgagtaagatcacctggttgcctgttaccaggctgtgggtcatgctgtgaggcctggaaatcctccacttgcaaccctcctcaggcccaatacagggctcaggaactgagctggccaaatctcatgaccacttggacctaccacgtggtgaggatgagagttctggtggattcccagtcattgatgtctgtggcacttcctaaagccacttcagagggagatgttctttgaaagcaaaagccttctgttctaagggttagggaaagcttatgcctgtctaagcagacattgcagatgtttctgttttcatctatgtgtaataaacacgtatttttctaccaatgcctctttcattttctacctcccaccactctctaaattaaagaacatctttaacattatttaatgtcagtcagtcagtcagtgttatgggagaaatttttagtggggagtgttttacagattggggtaaagttttccagagatgataagtgactacttcaataccctttatcttttcatagatcaaacatctggaaattaccttaatatgcaagactctcaaggagtactttcttcctttccaggtaatgctgtttttaaaggaagagcattctttgacccacatcttccttgacattaattttgtaggatcaaacgtgggtaaatgggctatggagaattctcatagattggtcatataattttctttttgtaatctattctgcttttgtagaaactgtttccacagcttcattatccacatttatattaaaaattctgaatctgtgtctcaaatcctgattacccaaataagtaccaaacttcattatttaagcctactgaaatattcactcccatctcccagagacaccttattctaaactttcccagagctgaaaatgctatacttccacaccctgcttctcttccggttttgtgtaacttggttattggtgccaccgtcaccagttgttcaaaccaggaacttgaaactcatatgggacccttccttctcatgcacctctaacattcaacccatggccaagttttatgcaggcttttctcaaatttggaaccatctctctatttctacttctattattttattaaagaacccctattcccatagtgcactcttaaacttatatctgaaagcaatgtagaggctaggaatgcaaattatttatcaagttcagatattactctactgaatttattaaggttgggtatcatgaatattttcttaaatgtttcacagcatgggatattcaatatataaagaaatactgtattctctactatgaaaaaatagctcaaaaataacctaactacttctagtttttttctattgttttcacacttctttatgaagaaatccaacattttatccaacaaatgattattctataattttttccaatatatctattctaattcgttcttctccacatcagcacatttcatgctgcctttgtttatctaactgattgtataacaatttttcaaatttgtttttaaaattaaatattattttttgccttaatagcttctaaaagatcctccacacatctagaaaacttatttctattttaaaacaaaggttacattaatttctttaacaaggacatcacattgttggattgtgttgaacctgtgatgaaataaaaggctcaaggattttctcacataaactctgtgaaaacatttcctcaagtgtctgtgcaatgaatgtttagtgctataaatccatctagtgtgtaccttgattttagcatttatcattatatcttcattctacttcatatattcaatattcatgtcctttcatatgtatacatagaaggaagagatcctgaaggacaggacaaagattcattaaaaaatattcctagtgcttactaccatgtatattaagtaaataaataaaaagataaacatgtattttaaaaaatattttagtagattaaattaagacctgatcccattaaattttatcctagggtttgaatattttgaaaaaagtttatattcttaactattttatctcacacattttttgttttctgagtgttttatcaggcatagactttaaattttccctttctatgttagtatctaaaatgcttgtagaaaggctgatcctgaaatatgaaagaagatacttgtaatgcatacctggaaatctcttgcttgaaatgtgctccattaggagcaaactcactcagctgtgttaatgatgtagatcaggattgtcctcctcagagtgcatttcctcttctgtggcttcatccataggtgaggctgtaacaaacacaaagtggaacaaacagggatgccactgttcatgatgttctttgtctcttgcagctcctcaggcagtgcaggacaacccagctatgcccacatcctcaggctcagaagggaatgtcaagctttgctccctagaagaagctcaaaggatatggaaacaaaagtcggcagaggtgccatgctcagaacccaaggatagagtggggtgaaagaaacacttcaggcagttctgaaatgcagtggcttattcttagagccaacctcattgagcagttctggagaatcatacttctgctccccttacataaaggatttctatatcctagaatcccaggtttatagaaagaggtccaaattggatccacttccggggtaaataacatcagtgatgacagctattgaatgcttattaagaatgggcattgttctaagcattttgcacatgataatatataatttttaaccttaaacacaacccattttagagatcaagaagctgagacgggattgttaaatatttttcccaaagaaaaacaatcagaaattggaacaatcagttttagaattcagtcatttttgcttcaaagcttgtgcatctttcaaaatcctacctatcaagaacaacgaagtcagaagctcagctgccatctgggcatttgcaatgtccatgcatactcttgaagcagcattcaattctgttcccccttttcaatgtatggttcatggggtttggtatcttgataggactaaggaaggggaagctgtcataaaccaggaagggaaatatttaattggaaagaacaaggctgttcattcaaattgcatttcctacagatttatccaataatggacaagtcaagccgcacacgtcttgctctcattatctgcaatgaagaatttgacagtattcctagaagaactggagctgaggttgacatcacaggcatgacaatgctgctacaaaatctggggtacagcgtagatgtgaaaaaaaatctcactgcttcggtaagttctattatacaacagaaacaatggttatgcccttcgtataactgaataatattagaaagcttggttgtaagaccaagaaatgtaatctcttgataatctaaaatacaaacttgccatgagagagtgctggatactacatggtcctttgtaacataagagtcatgcagcacaagcctggtataactgaattgggaaatgttttattgactcagtaatgccactgtctctctacaagataactctggatgacttcctataacactttccttcacctttcttgaaactaagactaaatttttttttggcaccctgttgtttgtcacggaattccttaagaaactccttaagtatttatttattgactttccaaggtaccatgatagttaattacatagtcgaaaatcagtgatatggtgtctttcaggacatgactacagagctggaggcatttgcacaccgcccagagcacaagacctctgacagcacgttcctggtgttcatgtctcatggtattcgggaaggcatttgtgggaagaaacactctgagcaagtcccagatatactacaactcaatgcaatctttaacatgttgaataccaagaactgcccaagtttgaaggacaaaccgaaggtgatcatcatccaggcctgccgtggtggtgagtgctgatgcctttgagaacaccagacaatcaaatactatcctactctgtatgcatccaagaatttttggtttcttttggtttgtcttttaatgtcaaagaacacatactgtcagtattcaagaatgcagcttctgtgaattgaatggctggttggtagatatttattccatatttaagcttgagattttgatgtttggaaatttttacaatttgtttgatggttagaaaagataaacattgttgaaaagattgtaactgaaatgcatgtgtctatttgcatgtgaattaatgatagagcaaacacattaataaatatcattgaacagaggctaggaggaaaacatcttctcagccattggtagtagtaacaaatcaaactgtgtctttccagacagccctggtgtggtgtggtttaaagattcagtaggagtttctggaaacctatctttaccaactacagaagagtttgaggatgatgctattaagaaagcccacatagagaaggattttatcgctttctgctcttccacaccaggtaacaggtttctacacaggacatctttgttggggctatcaatagaaaaagtgacaataacccactagaggtggtgattaacaactcaagaccaactcaagctttgttccaagttatacacagaattccctttatccaagagagcaattttgcatatctgttcaatgcattactaattaaagaattcatctatgtttcaaaatatttttggaactttgagcgatagcagagaattaaatggaagacggtatgtgctgtagtacattagaatctgactctgcatagaaaattctgccatgttgagatcattcattagtccaatttgcccagacatcaaatatttataggagaagagtaagagcaagattctgaaaagcagaacagcaagcgagacactttggggccctaaattaaagtgggttttacctagaagcatgaagtgtgtgagacagaatatatttgaatttttctaaacgtatgctttggagtaagaatcttgctattattgactgacccagacatttagtattttgtaaaacagttccactagttcctcctcgggctttccttgaattgctgactaatatgtgaatataaatattatttttctaaggatttaataaattaatatatttgaaatattgggcacgacacaaaataaagcacacattaaaaaactgctattatttaaaatgtatatatttgataacttaattcagttacttttctaagcaaggtttaaataaaaattatttaaatcctttcattcaccacctttggcagtttcctgagaggacttgcattctcttggtcacctctggcccaaaggccctgtctctgctcaaatagttaagttttctaaaatattttctaaaatgagatatcttctttcagaagaagcttggttctacattgggttgaacatgccctgatgtagaactcaataatttttttttcccaatgatcagaaacaatgacactacccaaaaacaccatatattttcagcctgagtacgtatagcagagtttaatattagacagaactgttcgttagtatcctttgatcccagccttccacatgacattcaccgctctctaagtagctctttgtaggcctctggcttctcattatcaatctggctgatttatgtgtctttcttttctttcactttccttactcctaccttctagatgactgtcagaaactccaattcagttatctataacttccatgttaaacctatctccacattctgctgtgccaatcccaaccacatcatagtgatctcctgaagaaaaataattatctacttccttaatttcacaaaacatttgcaaagatatctgtctccacgatatctttcacttacttccttttactagaacaagtctcagttaaaggcttcatttagctgagatagctgggtttctaaatagaattttattatcaatatatactttatgaccattagaactggctaaaatgtgtcattaaagaatgtgtctgtcattacatacagagctattgctgctgcttttctcttatgacttcctttgcataattttatgccttcattacttctgtgtctactatgtaataaattaatatttttctttaatatttctcttcttcataagaacttttttcctccaatatactgtgcttatttccttatctactcctcctagatttctacttttgttctgttttatgatttttatagttaactttttgtgtgtaaatatcttactgtcaatgttatttaatttcgattaatcttttatgaagtacataaattgagaatttgataatataattaccccatgtagactgagtattgcatatcctgggttatctcaaacacttgcgtgacctcagatacctcttgtgtatggagttattaccatcccctgtatagctagctgagtctattaaatatcagaatgcataattaacttaaatcacagtcagtaataccactttgggaatgcacatttagatatttcatttccaaatcccaatcactcccctctaccccattccgccttttccttatttgctactaaatttatgatttcaaacatccctcagctggagtataaatactagggtttcttctctttcttcaggcaagagccagtcttgagatttgaaatgtgctttatccatagataatgtttcttggagacatcccacaatgggctctgtttttattggaagactcattgaacatatgcaagaatatgcctgttcctgtgatgtggaggaaattttccgcaaggtaagatgctagtggatgctattttcactctacttccctgaatgcttggctattgcaattggaagcatagaaagcagatccagacaagtttatcttccaataatgctcttctttccaaaagagttttggagttctttggagagtggacaaacccaggagcctaatccaatctattaagacccacagccttgagaaaacaatcatttagtttcaccccgctcctgccctgcagagacaaatgaatggactctaatttacctgtgtctctcatggctattagatccagcagcagatttaaaatgccctgaggagggtcattcaatgcttacatacatatatggttatacttgttgcagatggaagtactttttgtttttgtcacttattttgctatatttgttgtagttttttggcataactcaagaaattcttgaaaaaaaaaactcagcaaaaaaaagggctacagactttccttactcttttaggttcgattttcatttgagcagccagatggtagagcgcagatgcccaccactgaaagagtgactttgacaagatgtttctacctcttcccaggacattaaaataaggaaactgtatgaatgtctgtgggcaggtacatgtgtatggtcgggagtgtgggaaggttgaggaaagggtactgaaagtccatttgagtcaagaactctaggtttacaggctgagaatccttaatccaaaaatttgaattttgaaatgctctaaaatccaacactgtgtgagcgcccacatgatattcaaaggaaatgtttattgaaacatttcaaattataggtttttggattagggatgctaaaccagtaagtatacagctgaattccaatatacaaaaatatctgaaatttgaaatacttctggtagcatgcattttggataagggataatcaagccatatacagaaaatactgaagtaatgcctttcttctggtcagtgcagagcacgttgctcttctcccaaagtttttcatttagaccccttttgagattcatctgatattggcctagaagtggccgtaagactacaaaccctcacttttggatgtttctctccttcacctcagcagggtatatttaaacatagcatgtggtctttccttttaaaattgtgtatgttcccattggtggtataactttataacttgcatgtctttaaccaaattctttcctatgtttttttttttaattatttctttttctcataggaagtgaagagatccttctgtaaaggtttttggaattatgtctgctgaataataaacttttttgaaataataaatctggtagaaaaatgaaaacttgtcctcatttttctcccacactgaagaaacagggactggaacttagagtgactaaggaattt

SEQ ID NO: 765 - DNA, 55380 bp, Homo sapiens
atcgtgactccgttttcacctggactggagtcaccgtgatacctgacatctagcaatcactagagtaggaaatgagtatagatcagcaacaagtccagcctttacagttgcagcagaggtttcctgtggctcgagtgtggcgagtcccggaaacctcggagcccgcagacttcccttcgcgggagcccgcccgaactccatcctttgccggcagccacgccccgcagtgggaaggagggactgaaaagcatttccttgaggctggcacaccttgccctacccaaccctgtcattatttcccctccgactgggccggtgccatcggaaaccggagtgaccagaggagggacacggtagtgaacggggtatggggggcgggcgcggcggggagggtaaagaaggtgggaagggaatggcagcgaggcagctgggggaggactttgcagttggggagggagaaaaagggaagaggctgggagcggaacgggtgtttatgtgaacaaacagaaatcaccaagtgaattaacctgtgtttcttcggaaccagcatcttgtggggtttggcttctgtgtttctatatgataagggagtaaacctgactcagcagatttggtgcagagagaaacatgagaaaacccaggaatgggggacctctgtttattcctggagagggggccatcaggagagggggaagggaaagaatgaggttacaggaattacttgtcagaggactgcatagcctttcagaccatggaatcgttgctttcagcttcggcttcctcatctgcaaagcataaatacggtaattactttccagggttgttgcgatatttaaatgagatatcaataaccatgctttaaaagtgtacagcctgatgtgctatcccttgttgactgaatctctgttttctttccttctttttatttggggtggggagtgggggagggagtcttgctctgtcactcaggctggagtgcaatggcgcgatctcggttcactgcaacctccgcctcccaggttcaagcgattctcctgcctcagcctcccaagtagctgggattacaggctcccaccaccacggccggctatttatttttttgtatttttagtagagacggggtttcaccattttagcctctgttttcttttcaatgtcttttttcctctttcatttttctctatcaacccttcatcccccctttctttctttcatttatgcgattgttgcttccttctgtaatgggtcctctccacattggagtttcttatacctatgagaccacacttccttcccactcggtgggaagtagtggcaataaaggagtcgagttactgtaatgtgcagcacagctcaactgaaatacacctggaaacagaactctgtgctgtctacctggtttttccccctcaatgcaccggaatctccactgacagctagctagggggcagctaggtctttcaatgagacatcatgaagtatttgcttcaatgaaaatcatatactttttcgttcagtgcctccattactgtgtgagtttgctagggctgctgtaacaaggtaccacaaactgcatggcttttggcaccaggcaccagggactgattttgtggaagacaatttttttcacagatgccgatgaggttggcgggagatggtttcagaatgaaactgttccaccttacgtcatcaggcattagagtctcataaggagttcgcaacctatatccctcacatgagcagttcacaatagggttcacgctcctatgacaatctaatgctagtgggcacggtggctcacacctgtaatcacaccactttaggaggagttggtgggtggatcgccctgagttcaggagtttgagaccagcctgggcaacttggcgaaacccatctctaccaaaaatacaagaggaagaaaaagaaagaaaatctaatgtcgtggcttatctgacaggaggaggagctcaggaggcaatgacagcgatggggagtggctgtaaatgcagatgaagctttgctggctcacctgcctctgatttcctgctgtgcaccccgtacctgtcggcgccccgggtgttggtgacctctggcttaaacaacgaaatgattttctcacagttcagtaggctggctatccaaaactaacatgttatgaagcctgcatctattccaggcctctttctttggcttgtagatggctgtcttgatgtttatatggtgttctccctgtatatatgtctctgaatttcccctttttataaggacactagtcttattggattagggtccatcctaattacctcattttaattgattatctctgcactatcatctcccaataaagttacattatgagttactgggggttagaatgtcagcatattaattttgagagggtgtacagttcaaccctttaacaactaatgtctttaattatgcacaagttagttgagcattgcatgtatttcagttttctctggcagaaactatttcccacctgtcccaaaccctcacaaccagtcccaaccaacatgtgctccgaagatctgccaggagttatgtgattctgcagctctgttttcttttaacctgagtgtgtacatttcctgttgccactgtaacaaattaccacaatggtggtggctttaaacaacataaagttttatcttacagttctgggggtcagaagtaaaaatggatgggcaggtttccaaatggatggttctttttggaggctctaagggagaatcaatttccttgcctccttcagtctctagaggctgctacagtccttggctcatggacccttcctccatcttcaaagccaggaatggccggtaaagtgtttctcatgtcttatgctgacgctcacttttgcctttctcacacttaaggattcttgtaattgcactggactcactgagtattccagggtaatctttctattttaaggtcagttgattcattccatctgtaaccttaattccccttcgctatttcaacgctattaaaaatcaacatggccaggcgtggtggctcacgcctgttaatcccagcactttgggaggctgaggtgggcggatcacgaggtcaggagatcgagaccatcctggctaacaaagtgaaaccccatctctactaaaaatacaaaaaattagctgggcgtggtggcgggcgcctgtagtcccagctaatcagaggctgaggcaggagaatggcgtgaatccaggaggcggagcttgcagtgagctgaggtcgcgccactgcactccagcctgggcgacagagccagactgtcaaaaaaaaaaaaaaaaaaaaaatcaatatattcataggttctggagattaggacatggacatctttgggaagccattattctgcctactgtacctgagctttcccaactgggtattctttatttttattatatgtatatttaaaatttatgtttaattaaaaaaattaaaaattatatatatatttatcatatacatgttgttttgaaatatgtatatattgtggaatagttaaattaagctaattaacatagtattatttcacatatttttgtgatgagaacacttaacatctactgtcttagcaattttcaagaatacaatacatagttattaactgtagccaccatgttgtacaatagatctcttgaccttattcctcctaacaaggaggaataaggtcataccctttcatatcctttgacgtctttctaacccctcgaattcccccaacctctggtaaccatctttctattctctacttttatgagttcaactttttcagattctacatataagtgagttcctatgatatttttcttttcgtgcctagcttatttcacttaacataatatctcctgggttcatccatgttgtcaatttccatttttcaaaaggctgaataatagttcattgtgtttatactgtatgtatttatactttattcatttatccattgatggacatttacattgattccatctcttggatattgtgaacaatgctgcaataaacatggcgtgcagacagcagtatgtgaaatcagacacactgatttcattttcttgctatctatacacagaaggcaaaacattgagccttcagaataaaagtaagataatatactgaataaagaacattatatacaaaagtcagatcactattggatgtataccgaatagtgggattgctggatcatatagtagtttacttttaattttttgaggaactttcatactgtttccctaacggttgtactaatttacattcccaccaacagtgtgcaagcattcccctttctctatatcctctccaacacttatttttcatcttttcgataatagctattctaacaggtatgaggtaatagctcattttggttttaacttgcattttccctgatgatcagtgatgttgaatattttttcacatatgtgttggtcatttgtgtgtcttcttttgagaaatgtctattcaggtcctttgttcatttttagtacagttatttgttttccccctattgttttagttccctatgtattttggatattaatcacttaccggatattaatcacttctcagatatttctaccattccatgggttatctcttcactctgttgattttttccttggttgtgcagaaattttttagtttgatgtaaccccatttgtctatttttgcttttgttgcctgtgcttttgggtttatgtccaaaaaaacattgcctagcctaatatgatggaccttttctctgtgttctcttctagtactttcacagtgtcagatcttacatttaagtctttaatccattttgagttgatttttgtacatggtgttctttattgagtatattatctatttttattctgaaggctcaatgttttgcctgctgtgtatagaaagcaaagaactttaaatcttttttctgaagaaaaacaacctgcttaatgatggaacaaaaaatgtgtccctatcgaacagaaacctgggtaccatgtacttgctatatatactgttaaaaactactccccattcccccttgtacttttagtattatagcttaatcctttatgccccattagtttctataggttatttttctataaaaatttcttgcagatccaatgctattttcatagatgaattagctacttatttattcaacaatcatatgaattctgatatatgccagacactgctcttggtgctagggatacagcaatgaacaaaatagctggtccctaaacttttattcccatgaaggtttcatgctttttcttcttcctttgccagttcatttttgtcctccccaccagcccaggctcagccagtctctagttctccaacatgctttctgaatttagatgtggctactgttctgtgcctacttctgggctgggctaatgagggacctaaagaagctgactgtgctctccaggaaattaaagtcttgttgggaagaaacagataataataggcaaactggttaagtactgaataagtaggttgggtattagatatcatgtcttggcatagtgtctaactggagaaagtgaaagtagaagggaacgaatgtgcacaaaggtaaagaagctaattacggctgggtgcagtggctcacacctgtaatcccaacactttgggaggctgaggcgggcggatcacctgaggtcaggagttcgagagcagctttgccaacatggtgaaaccccatctctagtaaatatacaaaaaaaaaaaaaaaaaaaaaaaaaaagccaggtgtggtgacaggtgcctataatcccagctactcgggaggctgaggcaggagattagcttgaacctgggaggcggaggttgcagtgagccaagatcgtaccactgcactccagcctaggcaacaagagtgaaactctgtctaaaaaaaaaaagaagaagaagtagaagaaaaaacagcagcagcagcagcagcaaattacacagacagacagtgtagagtggacagagtcctctctcagtccgggggacctgaaatccgttttaagctctggttctctctttgtgagcaaacagcaaggcacctacctcaggggtccttagttgttttattattatttttattccttttgaaaaatggagggtagagtttgactgggaaattgctggagattcttccaggttaaaaaaaaaagtattttattgttgaacttctcagaatttctttgagatttctaaccagaataataataagatagtttagagtttagaagagacagtcacctctggatacagaaaggataatggggatggagtaaggggtttctatccatccgttggcttaaagcctcatttcctgcagttgttctcacctcctcagcccaggtgtccttcttcactagcttttcttccctataccttctgctgaattgggcagttagagttcagccctatcatattgtgaatactacctcctaagggtgagtcttcaggaaacataaacatttcctgatgctcactctttccttagcccccagcagtctaagtcgtatccaagcttctgagcattatgtgcttccctgaaagccatctcaatcagttttctcatatttctcattcataataacccttcttggcatagtgacaacaaggaatatcaacagttaatttgttttgttttgttttttgagatggagtcttactctgttgctcaggctggagtacagtgggatgatcacagcttgctgcagccttgacctctcaggctcaagtgatcctcccatctcaacctccccagtagctgggactagaggcatgcaccaccacgtccagctaatttttgtattttttttttttttaagagacagggtcttgctgaagaccctggctaaccaggctggcctggaactcctggcctcaagtgatcctcatgccttcatcttccaaagtgctgggattacagaagtcagccacggaggtcagctgacagctaattcttaacaattgacatggtcagagcaaatcgaaggtagtgttttaacttttatgaccccaaatttatatttttatgctttaaattactggctaaaataaaaaatgaaaaggaaacctgttttagttttttcctctgtagctgttaacctttataacctcaataactagctccatctttatacatttaagggtatttttaaaaattgttagataacagtatataggaatatggtatttttagaatattgatctaaattaaaattatgtatataattctaggctaagttagaattctagtaagacacagtagtaaatgccaaaggtttaagggaaaaaacatgtttcaaactatgcattgtggttatagaaaaatctcagtaatacacatgtgtactagtcctttctcacactgctataaagaactgcccaagactgggtaatttataaggaaaagaggtttaattgacttatagttcctctgccttataagtttcctcaagaaacttataaccatggcagaagaggaagcaggcacgtcttacatggtggaggtgagagaaagcatgtgaaggaagcaaagggggaagagccccttataaaaccatcagatctcgtgagaacttattcctatcacgagaacagcatggtggaaaccgcccccatgatccaatcacctcccacccggtccctccctcgacatggggggattacggggattacaatttgagatgagatctgggtgggaacacagagccaaatcatatcaacatgtaatatccacatatgaagtcaggtgcctttctggaaaaagccttgaaatgattggttttagttgtacactcagacattgaatgatttaaccagatgtactgtgttgtgggagatgaatgcagggtttgtgttggacaactttaggagacagtattatgttatattcatattatgctaccaaataagtggtgaaaaatatttgccaaaggtgctaatttggtgtttagagaagttgatctcaagtgcttattttttctgacaatagtcagctatcaggaccaattgtatgtcaagtcacccctagtttgtgtcagtgaaaaaaggcttaaaatcaacttctccaaagtctctgttaagtcagatcaggctggcttcacttagacaggaaaagctcctggttgaccctcacctacatgctctttgacacctcttcagcctgggcccaaatttagtaccacttctggccagtaagaagctataacagcaagaaaggacttgtttagtggtagaattaacaggtttggcttaaggaaggaggagagaggcaaacggaatgctgaaaattgatcctgacttccctgtggtgagatttattctataagacttattcgcagattccacaaatccagcccatctgatgtgaaaccacatggcttccctgactcctacttctgtggtctttcctcacagggctcaaggcctggctcctttaacttaccttggggctgatatcttagtataagtcagagtgagttctggctgaggaagaaaaaagaagcagagtattaattagaatattcttaaagctccatcaatgaaaacacagctgggatataaatattgtagccttcatgtatctggtagagattggcagaggctagtctggacacatgtgcatcccaaagttccagaagaaactgtgacagtgtatgcacattgtgaattgcaagggccaggatcttcttcctggttctcatccctacaaaactcaactgaaaaaaatagatggaatatccagtcagccttatgaagggtgggaaagtgtagtgggaagagcatcagatggagattcaacacacaatgcttagctgctaattaactgctgggaggtgtctgaactctgtgccttaattcccccaccagtaaatttggaagttaggtttttgttgttgctttcaaagcacccttgtacacatagggcattctacggcatttgtgaagcatgctctgcatttcatagtgtatttgtcaaagagatcaagaaatagacagcagggttgctgttcttacattttttgtttctgtaacagggaggtgtgatcatagtggtacagaaggcatgggatggttacctcatttacagcgtgtgaacggcatggctttctgacactgagagttgaacctgctgtgtttgcgttctttcttgaagcccaagcagctcccataaccccaagtgaccttgatttcactctctgtctcttttcctcacccatatttcatacttagggacagtctaattaatggattcatgattggaaggtcccacatctgattagatctctgattcattttctgacttatgcatgtcaccttttcacttaaacttggtttccacatgcaatatgaagttggtaaaatagccatgaattattatgaaatgatttcctattacaaaaatggggataatttggaaaaatattccagttttgcagcattagaaaaaaaggagtgtaggtaaacctaatgtgatttataactacaattataatctcccctcccacaccaaaatcatttttctaagtctgcttttttgggggctaacattaaaacaaattattcttaatttgctgagttaacatttactaggaaatagagacaggctcacttgaactaaggtcataaaagtatgaccttaggatatctacaaacagacggacaataaagatttggcagtatcagcaagacataactagtgacaggttgtgggtttataaatattcagatagtgtgtgagatcgattgctcacaaaaagaagttcattgatccttggcatagaactctctgttctgtgctagatgtactagcatctttacacctgagtttagggtttagaggtgatattgggggctgcatctttgtggacttttactagaatctcagtcagacatattttgggtgcctagggagcagtggtctctgtaggaggatggataaatagaagtatttatattaataggaagttagggatgtgaattctttggacacactctcttgtccctgcaattcatgacaacctgagaaatttagatcatcccttgtggtctgtcaggggaaaatgagctgggttctgacaccaagacaactacagaacgtagtgccctatattctgtctacttatccaggtatgagaaggatcaacagtggccttatattacaccatgctgcttcacatagaatgcatttctggctagtctctgggactgggaggcatttgttgcccgacctgttctaggacagattctttcggagacagaacattctgtggtctcaccaaatcacacacaaattctggtttaacctttaaaggccatggaactataaagtttattatcaacaaatgttacttgtacaccaaaaactacaaaacatcccaagtatccttgaaagaagctaaagaagacctaaatgaatggaaagacatatagttttcttaactgggatgacttaatattgttaagatagtggtacgccccaaattgatctacatccttaacataatccctatcaaaattccagcctttttttttttccgaaatggtcaaagtgattctaaaatttatgagaacgcaagggagtcagaatagccaaaacagtcttgaaaaagaacaaagttggaggaatcacacttaatgatttttttttttttttttttttttttttttttttttttttgagacagagtctcgttctgtcgcccaggctggagtgcagtggcgccatctcggctcactgcaagctccgcctcccaggttcacgccattctccttcctcagcctcccgagtagctgggactacaggcgcctgtcaccgcgcctggctaattttttgtatttttagtagagacgggtttcactgtggtctcgatctcccgacctcatgatcctcccgcctcagcctcccaaagtgctgggataacaggcgtgagccaccgcgcctgtaagttttaatgattttaaaacttactacaaatctacagtagtcaagattgtgtgggctgggtgctgtggcacgtgtctataatcccagctacttgggaggctgaggcagggggatcccttgagtccagagcttgaggctgcaatgagctctgatcacaccattgcactccagcctgggtcacaaagtgagacattatctctagtaataataaggctgaaaagactatctttaatcataataaagagcagaaaaagattgtctttaacaaattatgctgggacaattggatattcacgtgcaaaagaatgaagttggacatttacctctaattcaaaatgaaccaaagtcctgaatataagaactaaaactatgaaattcttaggaaaaacctaagtgtaaatctttgtgatattggttgggcaatggtttcttagacacacgtcaaaagcactagcaatcaaacacaaaactgtcaaaattagaaactattatgcttcaaaggacattatcaaaagtgaaaagacaacatacagaatggaagaaaatattgcatatgatatatctaataagggtttagtttctggactatatactgggtacttacacaataaaaagacaaattgcccaatcaaaaaaaaatggtaaaggatttgaatgtacatttcttcaaagaagatatacaagtggccaatgagcacatgaaaagatgttcagcattatttatcatcagggaaatgcaaatcaaaaccacagtgagatatcatttcataccaactagttgggctacagtaaaaaagacaaaaagcaagaagtgtttgtcaaggatgtggagacactggattccttataaattactggtgggagtataaagtgatgcactcactttaaaacacagttgtcagttcctcaaaatttaaacatagagttaccatatcagcaatttcactcctacatatataccaaggaaaaagtaaacatgtccacacagaaacttgtatgtgagtatccacagcagcattttttataaatgtgaaaaagtgaaaactatccaaatgcccacccactgataaatggctaaaacagaatctgtgtatatccatacaatgcaatattatttagcctcaaaaaggaacgaagttctcattcatgctacaacatggataatccttgaaaacatttgcaagtaaaagaagccagccagatacaaaagtccacatactgtatgagtcaatttatatgaaatgtcctgaataggtgaatccataaagacagaaaataattcatgattgccaggggctagggaagggagcagagtagggaatgattgctattgggtaggggtttctttctggggtaacggaaatattctaaaataaggtagtggtgatggttgcatacttttgtgactataataaaaccactaaattgcacactttaaaaaggtaaattttatggtatatgaattatatctcaatttataaaacacaagtaatattaaaggtaattctaattttgcaaaaaaatactagtttttgagaatttactggacaaacagtataggacagatttttaagccaaatgatctgggttggaatccatcttcactgcttactagctgtgtgatctggagcaacttacttaacctctctctgtgccccagtttcgtcatctggtagaattaaatgactaaatatttgtgaagtgcttggaagagtgcctaacacatgactaccactatataaatgtttgctgttataaccggtgccataaactgtactaggtaatagtgggaatcaaaaccagtatcaaggaagtttgtgttaaagacaaatatcagttaaggaatagcagagcagggtggattccaaagcagattgcttcacttggtttattggctggactgtgctccatgcagatgtgtgaagagtctgggttttgtgcaagaggaggaagagatgacacggatcaagaatataacatctaaattttgccatcttacttgggtcctgggaaaaggcccaaaattatgttagaggggacatatggaggagtagcaaggaatggttaacagcacttaatatatatttgttgtttaatgtaaataaaaattaggcaaaaacttttcaggattttcctctggaattttgatcgtaaactcatgatgtttctcctcctgttctgatttgaagattacttttttcttgagacgtttttattatttcatttcaaaaagtaaaggtcagactgttaccagaaaggggtcccaattcagacccccagcagaaggttcttggacttcactcaagaaagaattcagggctagtccatagagtagagtgaaagtaagcttactaagaaaggaataggcagagcagcggtgtgggttacttgactgagtatatttatagttatttattgattatatgctaaacaagcagtggactgttcatgagttttcagggaaagggatgggcaaatcccagaacggagggtttctcctctttttagaccatatagggtaacttcctgatgttgccatggcatttgtaaactgtcatgacactggtggcagtgtctcttagcacgctaatacattataattagtgtataatgagcaatgaggatgaccagaggtcacttttgtggccatcttggtttaggtgggttttggcttgcttctttgccacattctgttttatcagaaatgtcactgtgacctgtatcttgggctgacctcccatctcactctgtaactaagaatgcctaacctcctgggaatgcagcccagtaggtctcagcctcattttacccagttgctattcaagatggagctgccttggttcaaatgcctctaacatatttccctcctcccctttacaaggggacccttaatcctaagggttgtagagggatgacgatccatcttctgtaacttcttctagctgaatagtggcaatgatattgatacctaactattagtgttttttgtattcagggtagagagaagcttggtcagaaagtatcagtatggagagggccattcataactcttgatttcccacaaaaggtaatatctggaagattaataagtgttcaatttaagaaaacattcagtaagcttatactgcattcctacacaaagggtacaaagcaatatattctgcaagagtagagcaaaataagcaaaactatcctaagtaaactaacaaggctttttgtgaagtgggcaactgttagaaccaagatgatatgtggtcactaactgattccagtacttgcccagaattagaatactgatccagatctttatattacccatccatcttgtttcttctgagctgcagtcagagatcactggttgatttacaggaataagcagggtcagtctaaattgcagaaaaaaactaaaaactgatgggactagaatctaacaacaggtgtaccatagttcttgaaacacaatttttctatctcctcatttttactaaagacaaatcataatagaactgatttgtttgcaaaaataagctttactattatacttggcctgattatttatatgaagttcagcaagaataattatttttcacataggttctttttaaattagctctgatgaaactttattccataagtaatttcagataagacttttaaaaaactccttgagctcagccatggttttgtaccataaaatacctaggagttggataaattctcctcctcttgaggtcacaagataacttgcctcctgggcccatcagaaaatgacattcttcacttacaggaaccctgtacagggactacatagacaaggtatgaggccagttttcctaaggagcttttattgactctgtaagtcaagtttgattcctcaaaggaaagcactctatttcagtcaaagacttggtaataaaaacagtttatccagttgtgtcctgttgcaaaagaaagcattctttttgcaattatgcaaataactatattccgtaagttaagcatactcacaaatagtttccaaattctggagaaatcagatagagagaaatatgctctaaaattttgtttacaggagtattgccacaagctacagataactcaaaaatgttcttgactctgaaaaacaaagcaaagaattagcaatgttttaagcaaaaagtcataaaaggattatttcagtctttcattagttcagtccatgcagttaactcctgttctgtttgatattcatgaacatttcagctctccgtgagaatcatgaaagttttcgcctctatcctaatgtcacaatctccaaagttatcagaaacctgcattcaagagcacctgtcaaatcctgttactgactataaggcacctttaaaagaggatcaaaacaagacaacagttgtctgtgaatgacagaaagtcttagggcagccacagtcagacatgattaacaaggaaatatggttacctctgtggcacacaataatattatgtaacaattataattactaataacatactaagtcatattagaattataggagtttcccataattttgggacacataaccaagaacatatttattcaaatacagcccaaagaaagccaaacacaattttatattttataatgcttcctgtatgatttctacagatttttataccacattaagccaaatatgtctcttctggactttaggggacctaatacgaaaagattaattaggtcagaaaaagacataatttaccatttgattttggaaagtttgtcaaatattgaaggtttaaccacttgattattagaaacatagaatctcaggtcaccgtaagtcattcatttagccaaaacgataactcaaaaattttaaaaagacaaaaaactttactcattaatagagggaagacagctttccacacaatgtctcttttccttcctttctttttcttatagtttattcaaaaggcaaacaaaatttcgtttttaaaaatattacacaaaaatcttattcaagagagaaagccagattttacagtgtactgttaatgtcaatcccaattcttaataaaacattatagacaaatctattcaatcgtaagcagttagaccaagaggtaagattcccataaacctttttaaactctttacaaatttttgttaaggagcagatcactgctctaagaacaccctgttgtgcttttattccaatgttcaatttacagaaaaactgaataagacccctttaactttagccgatatgttcacacagaatttccttcacaagattaatttttcacaaatcttccacaatttgctcaaattttcagcttcatcctaacttttaagtgaggataacttaacttagaaccccttagccttctaaactaggctaaaaaaaattcacattcccatgccttcttataatcttttaccaaaaacacatttcactttccttacacaccttgcatgttaaaactgtttttccagtagtctcaattatatgttacaatgttaactcttagcaacttttatttttggtgcaaaacctggtaagtaagtgattttaattaggtactaggtgtgaagcctaggacaccagagagaagtacaagataaggtctgattctttccagcattgccagggggcatgtctaattctacatatccccaggacttatctagaatctaatggctctaaagcaggtataccaaacaattttcaaaagtcaaataagcagtttatgaccttaaagtatttagcaaatctaattatctgatctgcctaatttagaccaaatgtctaaatttggaagacatttttattttaccaataatctttaaaactgtctttatttcccaaagcttcctaaagtcacatgaactaaaaagcattacagtttttatttttctgacaaaatatttaagtgcttattatttttaaaccaattaatcagagctctttcatatataaatgttacacatacaacacatatgactacacaacagacagaagatccagtagttgtaagatttttcatttgccaatttttaagtttcttaattgaattactggcttcagggaggagccctttgaggaacagggccaggaaagcatgcaatttctagagcctaataggcaggcacagctggaaggcaaaacagatttcaaaaatttaagggtcccatttttataccagatcttggatcccaaaaaagaggaaatcagcccacctcctatggaactcttatctctcagtgtggcaatggggacacttccagtatcttccaggtggtcaagagtatgcttctctgatccaaacatgcaaagagttaagtatcccccataacttccattagccatccctaaaagtatgtttcctacctagttattacaaaccaaagctctctcataataagaagtaatttctgatacccacaaaagtcaaaactgtcagataacacaatacaaaatgaaacaaagcattagattttgagagggatttatttatcccctttcaattctagtggtttcataaggaaaacagaggcttttttccaaaacaggatctgtggcaactcctctgtttttcccaaggagtctcaagctgttagaaattatcttagatcccctcatgtgtatcaagagtggcaagaagataaaacggagaaaaacaattgtattaatcccttgtttttttgttttttgttttttgttttttttgagatggagtctcactctatcgcccaggctggagtgcagtgacgtgatctcggctcactgcaagctccgcctcccaggttcatgccattctcctgcctcagcctcccaagtagctgggactacaggtgcccaccaccatgcccagctaattttttgtattttagtggagacagggtttcaccatattagccaggatggtctctatctcctgacctcgtgatccacctgcctcagcctcccaaagtgctgggattacaggtgtgagccaccgcactcagccctgtattcatccattttcatgctgctgataaagacatacctgagactggacaatttacaaaagaaaagctttaatggacttacaattccacgtggctggggaggcctcacaatcattgtgggaggcaaaaaggaggagaaagccatgtcttttgcctgtgggcgacaggcaaagagagagagcttgtgcagggaaactcccacttttaaaactatcaggtctcacgagacttattcagtatcacaagaacagcatggtgaagatctgcccccataattcagttatttcccactgtgtcccttccacaacacatgggaattatgggagctacaagatgagatttgggtggggacatagccaaaccctatcaacaatttagtcaactgagaagaaaaaaactttttcctcagagaaataagatccaagaagagaaaaaacataaaaaccttttaaatatacgtatagctcatatatcttcttttaattaaagctgacttttaaccatagcacttcaaaaatgcttttaaatctcttattacctgacttcagccaggccacacaatccatttttctggcttttaagctttaccaaaggtaacctcccagatgaaaccagtaagctttcactaaggttatgacttaatcacaagtgtaccagtattttaaaagagatgattagcagtttttacaagatttagagtctacaaggtgcctcagagaaaggaagattcaagaagggaagatagaagttgttcatggggggaggggataaaatcaacaaatggcaaagatcacaccaatatcaacctgaaagtactcattccctaaaccagaaattgaacgctgaaccagggatgccattgtgaaaaggcaaagccttagctactaagctacagcattgggaagtttccattgccttctcagaaagagcctggagcagacaattttgagccaatgaaggcttttaactgctcaaaacaatttttagagctaactttgtcataaactccaaaattgctgtcctctggatggcagaaactaagagaaagtactgccacatggttacaaggtcaagctcccaaggatataaaacaagatgagagagaaaccctatctagcttatggagtcccaagcctgtgttctatcccaaggtacctcccctttatgacagaataacacagaaagacaaattcaaagcacaaaatacaccagattcactacagcattaagactagcctcatgaatccttttattcattaattaaaacgttgcaagagagtgatttctaccattcctacaactggtttgtacagagagggaggaaagggaagggataaaagtgttgcctacagtggggtggggaaggcaaggagctcagagagactaggtagtgaaggatcttttctagcagtccagtcagctctcaagtttcccactttggggagaaaaaagctccccgtgtctggtgatcctgtacatgcctattcctgtcatccatatctgtcagcaaagagtgcaaggcagattaatccaaagagaatagcagttaacatcccatagtgtcaaatccacttttaaccaagaaggactttactgagaggggcctctaatccctaaatcttaggaaggactctaacctttctaaattgggcctcaaactcaagtttcattaagcatccttgccttttattaggaggggccttaaccctctctgtcttaggagagactctcctaagttggacctctaacccaatctgatcctttacctgggcaaaacataccccgccccttacctaaagtctgccaattggcagtgctgtggtctatttcctttgggtccataggattctcctcagtatagtcccttcatggtttccaggaagatgttattggaaaggggtcccaatccagaccccaagagagggttcttggatattgctaaagaaataattcagggtgactccatagagtaaagtgaaagcacatttactaagaaagtaaaggaaaaaaggaatggctactccacaggcagagcagcagtgtgggctacttgactgagtatacttagttatttcttgattatatgctaaacaaggggtagattattcatgagttttctgggaaagggttgggaagtgaaggttccacccttttttagaccacatagggtaacttacagatgtttctgtggcatttgtaaactgtcaggacactggtgggagtgtctcttagcatgctaatgcattataattagtgtataatgagcagtgaggatgaccagaggtcactttcatggccatcttggtttaggtgggttttggctggcttctttacttcattctgttttatcaacaaggccattgtgacctgtatcttgtgttgacctcctgtttcatcctataactaagaatgcctaacctcctgggaatgcaacctagtagatctcaaccttgttttaccaagcccctgttcaagatggagctgctctggttcaaatgcctccaacaaggccagtctttaaacattaatgcagtgccacgtttttgttcccaggacaagtcaagaatccatgagggtagcaggtattgctagcaatattcatatacctttgctttaaactgctttctgtatcagtcggagcacatctacacttcttgatgttcctgtagctctgactctttctgtcaacatacaggatgtacagattgtactaaagggactggaaggactggattttgaggaaatgatataaggtattaaatttcttgcttaaaatgatagagaaaaactcttatccaccttttctcaggttttacacttctgaattctcatatgtaaatatattttatatatcttagtttcattatagttctactttcttgggtactcctcatgaggtatcaataaataatcataagatcttgtatttgtactgattgttatacatctcaaatactttacatgcaactctctagaaaaggtatgttaattgggccaggcatggtggatcatgcctgtaatcccagcactttgggaggccaaggtcgagaccatcctggctaacatggtgaaaccccgtccctactaaaaaatacaaaaaaaaattagctgggcatggtggtgggcacctgtagtcccagctactcgggaggctgaggcaggagaattgcgtgaacccaggaggcggagcttgcagtaagccgatatcacgccactgcactccagcctgggcaacagagtgagactccgtctcacaaaaaaaaaaagaaagaaaagatatgttaattgacttgccaaaggtcacacaggaagtcattgacccagtgtcataattgagatctcctgactcctttccctatttcaggagaagtttcttccttttcaccaagcatttctcctagaactttccattgagaaataatttaggtgaggaaaacaagatgaatttcagagcggagggaagttgaagccaaagtgaagattactgtcaggacctcatcgtactggagactatattggtgcaaatatagcattattctaaagttcatttatcttagattttttccagagtgcatctcatattacctctccttagactcgttaacctttttctttctaagaactataagtagtgatctaagacaagataaaaagtgtggtcaacaaatgatacggccttgagtaaagttggcttgaaagtctgtgaaagaaataccaaagcctgaaggatttaacagatcctcaagttattcagcatagaaaagctttacttcaggaagcaagggtacttcagaagagatggccttgcgcctgtctacatgacaggagagggaaggatgtggggaatatgataattcttccttggatttctgaaatacttgtattctaaaactttaaagtactttcatatgttttatctcatttgtgctgtcaaaacatctctgattacattgcgcaattctatgacccgttattttacagattaggaattaaaacccagggaagtgatctaacttgctgaagattacatacaaatgagggagaaatgaatgaagggaggagggggagagaaagaatgtgtgtgagagagagagagaactagaatagtggctgccaatgtagaatcttatctaataaattagagtctggtgaattttctccggattaattaagaaaaggagataacaagagtttaaggcggggttcccaaacttggctgcatattggaattatcttaggagttttacataaatctcaatacctggttcctattcccagagtctgattctgatttaattggtttgagatacatctcagacaatgggatttttaaaaagctcctcaagtagaaccactggcttaagtcttcgttgttagagcctaggaaaagaatagtacaaaatctgctgcatccactttaatatgcctatgaccttttaaatttgaaaactatgaagcaatttacaaaaaaaaagaatagaacaattgacaatttaagacttaaaaaagtagatacattgcagaaggatggtaagaaaactgtactgaagcataagtaagattttctgtaaagtcaggtgtcaggaaataattatcttattcctgtggaatatacagaaatgcgagtggtattatgttatcatattgatgttacatagaatgaagttcttacccacaaggtgaggtcgttcaacaatgtcataatttgaggaattataataatgatatagtaattattataggaatattcttattattatagctatcataggaataattagtaacagctactgcttactatgtactaggtgttgttctaagtgcattatcatgtaaaattgtttaattattacaatggctctttgtgttagataatattgcaaacccaatttacagatgagaaaactgagcattaggagagattaagtaatttgcttaagagtacaaaactaattataacagtaggagaggtgggtatactggatttcagaaacgggctgggctatgcttctgagacttgtaagaaaactggaaactgagctgaaacctaggagtctgaataataaatatgcctttatcatggcagatataaaagaccataaggaaagaagtgagtgagcccagcatttcgctcatgcatacaagtttagagcaggaaaagtgcaggaccaaggcaggaggctgttgggctccagcgtggtcctcttaagataacaagctagctgcagtagaattgcaaacttcaacttaggaaaatacacacccctgcatacacacctcacacacccaaaaccacacttgcacacacactgctcccacacttttttttttttttttttgagaaggagtctcgctctgtcacccaggctggagtgcagtggcacgatcttggctcactgcaacctccgcctcccgggttcaagtgattctcctgcctcagcctcctgagtagctgagactacaggtgtgtgccaccacgcccggctaattcttgtatttttttttagtagagacggggttctgccatgttggccaggctggtctcgaactcctaacctcaggtcatccgcctgcctccgcctcccaaagtactggaattacaggggtgagccactgcgcccggccctgctcctgcactttcagttcactgaattggtttcccaaatttacttaacatttagcaagtctttgggcaactctcattttattgtgtctgtgctaagaagaaagaaattttagctacatttatgctaatgcgttgaaggaaagccacactctcttcagaccactggggtggggcagtagtaatcaaaaagggaagcttgatcaggagcacaaagttggaaccactgatttgaaaagtaattatgttatacaaataaattcttgctagaagaggcacttttagctactatcactgaagaacaattttactttcttattaattctcactagaatcctctgatgtaagcaggcagaattatctcagctgtataggttagtaaaccaaggcttcaatagattaagataaatccacccctaactctgacactggttcttttattctttctcctttactacagttggatggagatgatacattaactttgttcctgggagtcccaacttggctttctcccaggtcggcaagataatgcctttagcaagcaacaatgaagcttgttaaactcaagatttttttttttttttttttttttttttttgagacagagtctctctctctccctcagttgcccaggctggagtgcagtggtgcgatctcggctcactgcaagctccgccttgggttgatgccattctcctgcctccgcctcccgagtagctgggactacaggggcccgccaccacgcctggctaatttttttgtattttttagtagagacggggtttcaccatgttagccaggatggtctcgatctcctgacctcgcgatccgcccgcctcaacctcccaaagtgctgggattaccggcgtgaaccactgctcccggcctgaagccattaatcttgatttaacggttgtactttgtctttaattctaaacactagttctttaggaagattgttttccctcttggtctttttttgttaccatcagccaattttcttttgtatttctgctatcaaacttttctgccttgtagcctttcttcctttgcatgttcttattataaaataactaaggcttaattcattccatttggaaaatagaaaatagaggaaaaaattattaatagtaaccatcatcactgttgctgtaacattctaatatatttttctttgggcttcccctacacaggtgtttttcccagtcaatttcattgtactcttgccatatatacctcattaaaatgtgcctttttacttaacccactaacattacaaattgctgtttattaaacatttttgtgaacgtaaatttaataaatgtgtagtattccatggtccaactgtataaaaataatttgaaacatccctccttttgatgaaaattagttattttttctatttttaatttttttccagaaaatttcaaatatgtacaaaagcagcaaaaatagtacaatgacttcccatgtatatcccctgaatttggcaattttgaacacatggttgatttttttttatttacatctccacctatttctcctccttcaagtccatgaattatattttgaagcaaatccctatttatattttcaaaaaaattaaataagggtcacagattttcttgtgtgttcagaaacatcttccatttttaaaaaacatacatataattgacatttgggagagaaattacagagtcaaaattatgaatgccattcaggctctcaattttcatagtgccaagttatttttcataaatgtagacattcagattccttgtcagtcttacaagagtcatttttaaataaaactatttagggaataaacattagttttcaaatcttcttttctgctgggtgtggtggctcacacttataacctcagcactttgggaggctgagggtgggaggatcactcaaagccaggaattttacatcagcctgggcaacatggcaaggccccatctttacaaaaaaattaaaaattagccacccgggagatcaagtctgcagtgagccaagatcacatcactgcactctagcctggacaacagagtgagaccccagctcaaaaaatttaaaaataaataaataaataaataaataatattttgtcttaaatggattggcaaaaaatgtatcttgttttattttaaagtatttttaaaattactagttaagataaaaatctttcatcttagttcaacatgcttccatatttgttaaacattttgtttcagtgaactcatttacttttgtttttcacgtttttgactatttatttattggcatattagtggttttctcattactataaaagtactatgtttttatttgtttattgattgatgtttccattgtgatttttttttctgttggaagaaagttttttgtttaagcttaggaagttatcacaaacccaatataatttataatgttaagttttttatgtctcttaaagcatctagcttttttcccaaaatttattttgtgtacaggtgaatcaaaaatataatttttgttatcaaacaagtagtccattgcctaaattccatttgatgaataatctatcttagtacttctcaaccccagctgtatgttagtatctcctgggaagcatttccttgattgaagctgatatctgaagtcataatctatggggtttataatcatcataatctctaagaggagtggtgtattagtccgtttttatgctgctgataaagacatacctgagactgggcaatttacaaaagaaagaggtttaatggacttacagttctgagtggctggggaggccttacaatcatggcagaagacaaggcagagcaagtcacatcttatgtgaatgatggcaggcaaagagagagaactgtcttgtgcagggaaactcccctttataaaaccatcagatctcgtgagacttattcactctcacaagcacaggaaagacctgcccccatgtttcaattacctcccactttgtccctcccacaacacatgggaattcaagataagatttgggtggggacacagccaaaacatatcattttactcctggcccttcccgaatctcatgtcttcacatttcaaaaccaatattgccttcccaaccgtcccccaaaatcttaactcatttcagcattaactcaaaagtccacagttcaacatctcatctgagacaaagcaagtcacttccacctgtaagcctgtaaaatcaaaagcaagttagttatttcttagatacaatggggatatagacattgtgtaaatacagctgttccacagggagaaattggccaaaacaaaggggatacaggccccatacaagtctgaaatccagcagaccagtcaaatcttaaagctccaaaatgatctttgactctatgtctcacatccaggtcatggtgattccagaggggggttcccatggtcttgggcagctctgctgctgaggcttgacagggtatagccccactcctggctgctttcatgggctggtgttgagtgtctgcagctttcccaggcacatggtgcaagctgttggtggatctaccattctgggttttggaggatggtaaccctcttctcgtagctccactaggtggtgccccaatagggacattgtgtgggggctcgaccccacatttcccttctgcactgccctagcaaaggttctccatgagggccccgcccctgcaggaaacttttgcataggcatctgggcatttccatacagcctctgaaatctaggcagaggttcccaagccttaattcttgacttctgtgtacccacaggctcaacaccacatggaagctgccaaggcttggggctttcactctctgaagcaacagcccaagctgtaccttggcccttttagtcacagctggagcagctgggacacagggcaccaagtccctagattgcacatagcagagggaccctgggcccagcccatgaaaccattttatcctcctaaacctctgggcctgtgatcagaggggctgcctcaaaggtctctgacatgccctggagacattttcctcattgtcttggtgattaacatttggctccttgttacttatgcaaatttctgcagctggcttgaatttctcctcagaaaatgggattttctattctatcacattgtcaggctgcaaattttccaaacttttgtgctctgtttcccttataaaactgaatgcctttaacagcacccaagtcacctcttgaatgctttgcttctgagaaatttctttgtcagataccctaaatcatctccctcaagttcaaagttctacagatctctagggcaggggcaaatgccaccagtctgtttgctaaaacataacaagagtcacttttgctctggttcccaacaagtttctcatctccatctgagaccacttcagcctggatttcattgttcatatcattatcggccttttggtcaaagtcattcaacaagtctctagggaatttcaaactttcccacagtttcctgtcttcttctgagccctccaaactgttccaacttctccctgttacccagttccaaaatcacttccacatttttggctgtcttttcagtagcaccctactcctggtaccaatttactgtattaatccattttcacgctgctgataaagacatacatgaaactgggcaatttacaaaagaaagaggtttaatggacttacggttccaagtgactagggaggcctcccaatcatggtggaaggcaaggagcaacaagtcacatcttacgtggatggtggcaggcaaagagagagaacttgtgcaaggaaactcccccttataaagccatcagatcttgtgagacttattcattatcatgagaacagcatgggaaagacctggccctatgattcaattacctcccactgagtccctcccacaacatatgggaattcaagatgagatttgggtagagacacagccaaaccatatcaagtgggaaatgaacatcaggattgatattttttaaaaatgcctcctaggagattctaatgtgctctctggtttgagaaccactcatctgcttattttgattcttgctgacttctttatattaaagtcctaaatatgtgtctctttttctgggatacttatgtgttctattaatctatctctctgtttttcagtgtgtgtgggtgtgtgtgtttaggctttgtaaaacatttatgcctgatacaggcctctccataccaaactttgctttgttttttttagaatgagagattactgcatgttggggtattaccagttccctttcttatcttgctggagccctaagtttccaaagaaatcaactgtgaaatctctctctgaactcctcttttcagtcctctcattcatataggtcgcaaagatcatagaagagccccctaaacacattttctccacatcctcaccacctattcattcccagaaccaccctgctctctggccactgcactatagctattctttctatgatgggtgacctccatgttgcctgtatctgctacttattgttttcctgacctgtcatcagattttagcccagctgttgtccatgcccctctcctttgcttccacaacagcacaaactcttggttccccttttacttctctagtttttccttcttaggccctctttgagtttccccctggaccccaattcctcttccttcatgtagcccttatccgttggaactccatggattctttcctaggccctcttttcctctcttctctttttcctttttgttcattttttcctctttctctcttattcactttcaagctttcaatattatctaatgactcccaaatatttatctctggtccagacttcccttatgaatcctaagaactgtacaaccaaatgcttttttctaatattctacttaaaagtcacactggcatcttaaatcaaaatgtccagaacaactcatcatctcctcttctttgatttctccttctccttcttaccttctacaaccactgtgtcctgttggttcaatctcctcaaggtttccaatccattatttttcttttttttactgtcactactgtaatccaaaaaatgattatgaaattattagtttcacaattgatattctcgtatgtatttattatcacctgcaatttattactcaattgctgcaaaactaatactcatttttacttttcaatttgaaatgattaaaggttcacaagtagttgcaaaaatagtatagaatccaatgtaacaattaccaattttcccaatgggaacatctaaataactgtagtaaattatccaaattatgaaactgacaatggcacagtataatgaactagaatgtagagtttcctgggatttcagtttttgcattcacacattatctttttcctctctgtgcatagttctttgatattttatcacatgtatagactcatgtaattttcaccacagtcaagatacagaattgtctgtcaccataaagaaactccctcatgctaccccttcaaagtcacaccttctccctgttcctactggtaaacactgatctattttctgtctctctaattttgccattttggaaatattatacggatggaaccatacagcatgtaaccttttgagactggctttttccactcagcataaagtccttaagttccatctaagtgttgcatgtaggaataatttgttccttcttattgctaagtagtattccaaataattttttttttctaaaatacaaaatggaccatgtcactctatttaaagcacttcagtgatacttagaataaaacaagcaatgtttagcatggcctaaaggctcattatgatctgcctctcgcctacctgcacagtgccatctcttcgtgttttctcctctcttgttactgtccaggcccactgaccttccagttatgagaatgtatcaagctctgttcccatccaaggcctggatattcctcctctcttgccttgtggctgtgcccacctttatctagtcagctcctacttatcatttgcttaaatactgtttacttaaagaaactttttttgacttccttcctattgccccgtttttatagcaccctaaacttctccttcatagcaaaacatatttaataatttttatgattaattatttaacatctgagtgaatgacttggtataaggctggccccccaaggaatgatgtgagataaactaactagattgtagaagtggaagaagtagagctgtcttgaatggacagttcagttacagagcaaaattcaggcaagaattagcaactcaggttttcagtgtggccagcagaacataaaggtaatgggttcaggggtgtgaatgaaataggaatgaagtagagtggagcaggatgatggtcagtaaagaggcattcaaccattgtggttgcatttatctgggaggcttttatattagtagcaagagctcagtaatcagagtataaagtaaaatttcaatctcacttaggattgatttaggcaaagagaggacaacacggccccatcgacttgtgtggcattcaggtgagggctccagatttgagagggttttgttaataggcatgagtaagtgggcagatttggggaagtggataaaggctacatcttccccaaattggagagtatgtaagataaataggatgaagaggactgagactgctgatctccgtaatgcccccgtcagaattggttcaggatctgggtggaaattagccagcatataagtgatatcagcggaaccagtacaaggagctgaaaaatttagagacagaagaaatcaggcaggtgctgatatattttccctgatgaataccataccactatctagcattctttccatttctgtaccttactttacagcattatgctatttgatttatctggtttaaatctctctttctcaacatgattgttaaattcagatatctactggcagctgtactatttctgctatcaaatgacacctagttgaagtataaaaagttttaaatcctgcattaactttttgattactttaactccctctctgtgcatagagtatacttacatgcacaaatattataaatatttagataaaagattttttgtttcattttgttatttttggttatacatgtttacctgattgatacagctatgtgactatttcccaactggaaaggcagatgaagaaggaagggaggaagagggagactaacacatattgatgatcgcaatggctctggtaatgttctaggcattttacagaaattatgctgcatagctctcaacaaccctggtaggtagttatcatcagcagcactttacatatgggaaaacaccttcacaaagttaaaatacgttatacaaagtcatcatgaatgataggaatgagattcaaatggaagccaaactccaaagtcttaccattatagcacaggaaattctatgcagggtaagtgtaggaatagatatccatcagattccagggctgccatgatatgggtaggaagatgtggatgaaaggaagcctccaaaatttgggagctcttgcagggacaaggagaggtagcataactggctgagggtacttattgattggcatgcccgttttccagttgataaacttcctactgctctctgcagttctttattacccttaggagacatgcacgtttcctgctcactaaactaggaaggcaaggaatggcaaggtcaggtgacatgcttccggatgctgaatgaatcacccaccaaaccagaactagaacttccaatctctcactctgttattacagcactaagtcagggctgactccacttcccttaattcctggactgctcagctctgaaccatgctgacccactccctagggaggggaaactgcccttggatcctggctgtacagaatgaggcaggaggttatgtgttcccagaagtgtctttttcctctcgccaggagtttgttattgtttacctggaattacattctacatatagaaattttatagtgacacactgtatggcacagcactgaggtaaacaggagctgagttagctttctgatggtgaaacctcatgtccacatctctctgcctgggcctgggactcatttatcagagaatgagaaagtgtgtgtatgtatatatgtgcccctacagcctgttgtagcctgtcttccttcagtcctcctcagcttgggccctcctctctgccagagggcagtgtgttagacaggctggaagagtggccagaaaacaaaacagatctcctcacttatggggggagacttccaagagagttttagagaacccaaaatctttcttagaaggaaaaacccagcaggctgaataccaaagaagaggactgatccttggaaatgcaaggtcactgacaacagtaggaacaaggtatttgaaagcagccccaacccatcttctggtgcattaatcaggtaggaaaaggagacacggatggattagagataatcctgtgctgagtgggggtggcgttgtgagttctcagcttttccctctcactgatagcccttattctgagctggggaaactgaggagctgggaaaattgttattgattaggaatctcaggaagagaacgtaatcagcaggagaatatttaatttaagatatgctatttctgggcttttctttgaaactggtagatgaaggattatggaattgggtacatacaaaatagcaagataattataataaaaataaactgttttgaatttgtataatacctcaaaggaaataaaatgtgtttatctgcgaaaccatatttaaaatctgatgctgtttgtaagcatctgtgagcactgcatttcttacctagatgttatggggcctgtcttgcaatcacttttctcctctacaaagtaaacttttgtgaggtaccaggatatagactaagcttcctcatctcaactgtatatcacatatgtttcaggaatctctggagacaggtaaaaatagaagcaagaaaaactgatagccctcagatttcataatttggtgagtaccagtgagtcaaaagatctgttgaaacaggcgcaggactcctaggcaccatggtggaaaggggttcccctttgagaacccatttgaaacactttctctagtgttcatttcgatccctgggtctctaggaaatgggggagggcaaagatcagaaataagcacaatttctcaatatctgagaagagtgagaggacgagataacctctcttagataacctcctccctgcctcacccacactaggagatatcacagggcataaggcaagttatctacacaaatacgcttctctggatttaaaaagaatcacctctccagtgtgcccttccatgcactctgtgtcctctcactggtttgtttccctagaacggtagagcctggggcactgagagagacagcatgaagaccctaattcctaagccagtgccctgtcccctgcaatttctggcctctttctgaccctcatgctcacagtgaaagatggctagtcctaagaaccgggactttttactcaaaaagcagaagatagaaataggattggggatcagacccaggaaaatgaacaaaggaaacaacccaagatgacataatctggtgaatactaggaaaaaaattctgattctacttctattttcagaatatactttaaagacagacatgcagatgtcatctatgtccctatgaggttcctatatggacacccttacaggcagattcaattcatccattctttccaaattgagtgtatgttagtaaaatttggtttcagccttgtggtttccatgattcttttggattccaatgtaattccttcttgaccttgttggtctttctcatttgaaagacaagtatatatgcacaacaaagtagtataaagaacattgggtttgtaagtaaaagacctgggtgtgcaaccttgctctgccatttttttttaaaaagtggctaatttggtggggtacagtggctcacgcctgtaatcccagtactttgggaggccaagtcaggtggataacctgaggtcaggagttcgagaccagcctggccaacatgataaaacccatctctactaaaaatacaaaaattagctgggtgtggtggcatgcacctgtaatcccagctatttgggaggctgaggcaggagaattgctggaacctgggagacggaggttgcagtgagctgagatcacgccattgcactccagcctgggcccacaacagcgagactccatcagaaaaaaaaaaaaagtggccaatttataacttaatcactaattcataacttaatccctcagtttctgccttgccttctttgtatgaaagtgcctagcacaatacctggcacactgtagttgctaaacacaggtttattagatctgaaaaccggaagcttgtttcataggatgttggtaacaagtaattctcagattctctagatctgagcattgttctctatctcacttccaaattaatatattcagcccattaaacatgttttttgtttgttttggttttgttttttgtttttgttttttttccagatagctcaagggtaagaatgaaacgctaactatacaagaaggcagactgtttcaggctaggggctgctacctccatatattttaccctcctcacttttagtctttgagtcctctgccccatagcccaaagccattaataacttccttgatccatgtggcagccacctgggagggtggatcacttgtctatctaaaaagaacatggctggaagatccacatgtgttgataagcaagcagtaaggttgaaggtgaggctggcacaacagatttaactgtaccttactggaacagggccagatgttatactgagttcaatcatggaatttttcatcacacataagcaggcagagtgcaggaaatctgattttagaagtcttatatctaggtatattttggtaagaaaagtttactctggaaagtcatgggtaaattgcagattgtgtccgggagactgtattgtgctaactgaaaagaaatgccacttattaagagttgtgttatggttgcaaatagaatatagtgtgaattaaaatagatgcctaaatgcagtgtgacactatgcttgtattgtatgtgtaaaagtttagaattaatattactatttagttcaatttcgttatagttatattcatgagcttttatggtcttcagactatagtcttgtaaagatttagcatggactttactcctcatttcactttcattctcctcccttttgtatctccttcattgcactgtttcttctcaggattctcaatgaaagaggggagttaaacctttaacatgctaagagaaagtctgaagcaactgataagagaaattaaggaatgataactacaagtgaggcaatattatggttctaactagaaccctgcctgaagagatttggctctgtagatataggattatgtaaactagaggcaaagtatatacaaacatattttacaactatcaaacatatttatcagaatgaaatatattacaatttcactagacccttgattccaatgccatggatttcattattcataacattaaatagagaactgtggataatgctttacagttcagctaagagaagaagcagtagcctacatatattttttgacatagtgggaaaagtatttagagataatgaaagggagtggagtattggtcagattgaacaggaatcttggccagaagtgtccttctagtagtcaggtgggccagagttgaacccatcgaagagtcatcctagaggtttttggcattaaggcatgccttttctcagcttgacagagtggacaggcaaagccatgtggtttctgagtatgaatttcaagctaaaaagtgatctagagaggaatattgctgttacaagtaaatataagcatcctctgatgtatgagctttggtggcctctgtgtggtgaggtttcccacattagctttcatggatatgtgggtatgcccagtgtgtatgccttaaaaatcctagactcggccaggcgcagtggctcatgcctgtaatcccagcactttgggaggccaaggcaggtggatcacgaggtcaggagatcgagaccatcctggctaacacagtgaaaccccctctctactaaaaatacagaaaattagccgggcgtgcgtggtggtgggtgcctgtagtcccagctacttgggaggctgaggcaggagaatggcatgaacctgggaggtggagcttgcagtgagcagagatcacgccactgcactccagcctgggcgacagagtgagaccccgtctcaaaaaaaaaaaaaaaaaaatcctagactcatctggtacactccatatgcctctacctaaataaactgtaaccattagaaagggtttattgtatacacatatggaaagcaatttcattgggtggacctcatcattctatacatttatctccttgctctagcatccaatttcactgggctgcaagatatcaataagccttgcctctttaaactacttatgtacaaataaaagtgatggtgagaacctggctcaggaaatgcagtagcaggccatattgcatccaaaggtgagtgctctgtaataggtgtgatagttagtgtaaggatataagcatgagtttgagttatcagggatttgtgtgtttggccaggtgcctatagttgagtatggatggccctccgtgagcagttcactgtgcccatgtgggggtacacgtacacatggctttaaacgactcccttcagtatgtattagtgggtgtgtagtttgttttctgggccgagctcatgagtctgagctagctgctgactgacccttttttccacctgtgctgtggtaagagagagtgtgctgagaacctcctcctcagaaagccaaactggttaaactggctgctccctgaatgaaaacaattacttctgataatccactaaaaaggaggcaaaggaaaggaaaataagaatgataatagcagtgatcacttttctaatagccttcctgaattcaccgtgctgatccaacgttttatttttcagaacttctcctttgtgccactctcttaaggtctgttttttgaaagtttcatcactagtgctagtccttccatgtggcctcatgaattgtggaagctttctcagccacatttctccttgccattttggtttacacactggatacagtggactttgctatctaactattcatcaacttcttagatcccattctaagaataagaataaggataagaagttccctcttctgtgccaattttccgcccgctggctacttggctgtttacctgagcttctgtcaaccaactgcacagttttgtttctcttgagtcgtaagggaattgtttaactattaaacccatatacaagttcatggtgctccaggaagagtggaacacaagtaaggcagaatctgggaggcttctttacataggtctttcaggcactgagagattctgcctcagtaagtaacactgtggttattagtatcagtattaaaaacaatgcataatgtaatgatagaggacagcataatatggctaatgtaacacctgtacaacatagtagcatattatataagctatacttctgatttttgttttatgtttttatcaagtcactacaaaactggatcacatatttagacttatttagcagaaaatcatattttctttcaagttaatcagaattaaagaagtaggctttgttgactatagaaccatgggagtgtcttgtcaagcaaaggcaaaatataaatttaggagaggtatgggacagtggtaaacatgagttctctttggaaagaaagaaccaagtttctagggctgttatttgaaatatgtactgattatattatatagacttaacagtgatacacataaagaatcccttgccagacaaacaagaaactaataactagagtctacttggaggagactggaggagagttaagaactggataaatggagaagaatgggggggagaaatatttttatgctatacaattttacactactattttttgaatcatatgaatgtattttctttttatttaaaagagaaagagaaggtggcttggtactgatacttcctttatatccttgtagcaatgagtgtccgtgtctatatctgatatgagcagaggaagcaccttgaagctctgagggatgaggaattaaatagtttttattgataaatgctgtctgttcactgcttgtgagggtgtggatatttcagagaaacaaagcaaatgtgtaactcatatccttcgacatctgtcaattttttatttgttatctgaattaactgtgtgtaaaaatgaaattaaatgttttctttagagctagaaatggtagctcatgcctgtaattccagagactcaggggattgaggcaggaggattaattgagcccaagagtttgagatttaaatgagccatgcatgatcacaccactgcactcaagcctggctacagagcaagatcccaacttcaaaaaatgttttgcttaaaaaatatgatgcacagctaaaaaaaatatattagacatgcttaatactgtaggggaggtagatcatgcccacataacccatggatcacagttcagatggatgttttgaatctgtacttgatcatgggagcagaagtctcgggtgggaggggagactttaaaataatttcagtaacagttgaatgaaaggacaagagcagatcagagctctttgctgtataatagagaaaagagaaacgctgagaggaagagaaggttgggagggttcttccaacctgaatatcagctaggtagatagagataaacggatgactcagagaggtagccatttacttaactagtgatctgtagaggcggtttaaaattctgtgtgtacttcatttattttttttcattcattttatttttttcaaaaaccactcaatccttaggaattactcacagctgtgctgtgtgcattctctgtgggcctagcagggaaggggacagccctgtggcaatgggcatgacacggatgctcctggaatgcagtctcagtgacaagttgtgtggtaagtacggattccacagatgtctatcctctgattttagaattatgaaggctaaggtctcggtagattctagaaggaggatgatttgatttccagtagaaatgaagacagtggtgataaaaggatggggactagaggccattgtctttttggggagagggtaagtgctaatcagtgatccagatgctgcatcttcaatcttggtaagaaactgccagaagcaacgtcatgcacatttgatgggctaagaaacagagtcactggggtttctggttagagagttgctcccagcagtgtttctgttgaatggaagtagaggagatggtagaagagatgaccttttcatgtatgatgagctgagagctggcgggtaggggaaattgcatgaacaccaggttaggcttcttcattctcttctcttcctgtgtgatcgcctacccagtcatccaggagaagcagtatgaagtgattatcgtcccaactttgttggttactatcttcctcatccttcttggggtcatcctgtggctttttatcagagaacaaagaactcaacagcagcgttctggacctcaaggtaaagctcaaactttggggctgggcaggggcttaaagaagatggagattaggaaaaagtatggtctaagtttcaatgagcccatgtctagaagtctaggtacctgcaatgagagaggcatgggttccctcccatggagttgagagggggatgatctcttttctaggaattcccgagttggaattcaacacgtgcttactgactgaaaaaagagtgtgcaagaaaaacctcatataacctgtttctattcctgttggactatcaaaactttgactatatgagtgcctaaggacctaggagaaagacctaagggggtaaagtccaaggctttatgaacatcctaggaggatgacatatcaccctatgatacgttccattcctaatctttgcctccaggatatatgatggaaaggaggggcctttatattataacagtctttgaagtgctaagtagatgataacagtctgttctggagttccactgagcatataataaaagggaatcaattcacagatgaaactcagggtaaaaagaaggaaaaagaaaactctcataatgatatgaaactctatagtggctaatccttagtttttctttaaattttatcccaatagtcttatacttcacttttatagaaaacttctcaaacaagttgtctaaactcactcctactacttctactcatcacattctcttttgaacacactaaaataaggttttcatctctaccacttcgccaaaacaagtctttccaaggtcatcaatgacagctgcattgaaaagtccaatgatcaattcttagtcttcgtcttacttgatctgtcaaaagcatttgaaacaattttaaactttctctttcttgaaatactgaaaaaactaaagccacttcctaaatgctataatttttagtcttatggattcaaatacattttctattccaatgatagtcccttgaactcaattctcatattaaaccacctactgcacagtttcaatggaatacaaatctcatatgtaatatgaccaaaacaaaggtcctgaaattctctcataaatgtcctccgcaaatagtcttgcctatcttagtaaatggcaagtcctgtcttctgtgttttcagtctcaaaccttgaagatatcagtctcaaaccttgaaacacagtttgagactgtgttttcagtctcaaaccttgaagataactcctttctttctctcacagtctgtatctaatccataagcaaacactgttaccctattttcaaaataaacccaagttactctcacatctcactgatcactgcaacacactcttaacattccctgcttctgcccctactcctttatagaaatgccagaatgagtcttttaatacagtcagtcctgttagttatctgcttgaaatctctcttccacacacacacatgcagtagcctcccaccttgctcagaatgaaaaatgacaaaattttttccatggccttatgtgatctgggcctccctggccttgtctcctactactctccaatgatcccacttggctccagctacactggcttcctggctatttctcaactattgcagctatgctccctgcttaatgcttttgcaatttttgctttctttgcctacaatactctccctgacaccagcatggtttgctccctagttgcttccaggcctttctcaaatgttatctcatcagaaaggcctttcttgaccttcatatataacacaggtgactgattcactgatgcttcttctccccaccacctttttttgttttttttttaaagagatggagtctcgctatgttgcttaggctgaatgttaattcagcccaggatctcctgggctcaggagatcctcctgctttggcctccccaatagctgggattataggctcatggcatcacactcagctttttctccatcttttattttcctccacaacattaattgcttgatatattattacctgcttcctctcccctaccagtagaaagtaatcttcaggtgaatctggacttttcctgttcccagcacttagaacagtacctggcatgtaataggtgatatttgttgaataaatgaataaatgtagatttaataagaaggatgaacctctcttttttgctggccaagggaaggagagagtaccagaagacttttttgaccaagactcaaggaaatatgaaataacttgacttttggggtaactcaaaggaggaagaataaccatagcttaaagctgattaattatccatacctttcctccaacgttgaaagccatttgtctgatttaaatgacagttctcactggcagttacctccacctttaggcatctgtggtttggatacctattcagtaacttccctaattgtctccataccacactcatgggaagtactcaattgtaacccagaggaaggaaggcagaaaggaagtgtcatgaccgatttcctggggtccttcttgagttgtcctaagaactaatggggattattataaaggttctacaaacttgacattgatgctggtttatagagaagcatcagaagacaactccccattggccaaagagaaaactgctgaaggaacctccttgccaatttgtttcagggtctgctttccgggatccccagggcggggaaaaactggttgacatcatctctctgttctaggcattgcccctgttcctccacctagggacctaagctgggaagcaggacatggaggaaatgtggctttgccacttaaggagacatccgtggaaaactttctgggagctaccacacctgccctggctaagctgcaggtgccgcgggagcaactctctgaagttctggagcagatttgcagtggtagctgtgggcccatctttcgagccaatatgaacactggggacccttctaagcccaagagtgttattctcaaggctttaaaaggtaaaacaagaagtgtttgactcccccttcccctaacagtaaatattaacaggctttgcgaacattgagatgttaactaacagatagttgtgatcataactgtgtacagaagaaggtaatagagtggaaacttgaggcagaaatgtttttcttggtgtctttttttttaattacacaaattgtttatttgtgaatccttacccaatctccaaataataactaaaatgactactacaaataagcataatgttatgatgagtaagatgttagctgtgggtttttacacagtctttattgtgttgaggtacattccttctgtactttgtgtagtgtttttatcatgaaaggatattggattttatcaaatgccttttctgcattgattgaaatgatcatatgatgtttatcctttattctgttaatgcggtatgtcacagaattgatttgcatatgttaaaacatctttgcatcctagattccctagctcttctttgcatcctaggttccctagctcatctttgcctattgaggctgttaaaacagattttttcacaatggatgttacttgtactaggattctgaggttgtttcctcattttactttattctttgataccccttcctgatattatatttcttttttctttttttttttttttgagacagagtgttgctcttgtcaccaggctagagtgcaatggtgccatctgggctccctgcaacctccgcctcccaggtttaagtgattctcctgcctcagcctcccaagtagctgggattacagccgtgtgccactatggccagctaatttttgtattattagtagaaatggggtttcaccatattggccaggccagtctcgaactcctgacctcaggtgatccaccagcctcaacctcccaaagtgctgggattacaggtgtgagccatcatgcccagcttacattatatttctctctctctctctctctctctctctctctctctctctctctctctctctctctctctcctcttcatgatatgggccagtaatggtggatacatagaacaaggataagacaagcaaggatattaatccaaaggactagacagtgataactttttaatgcaaacagactatctctctatttaggcagatgaaagcctatccagttctaataattatgattctgtgttacctttgataaaagatcagtgacattaagcatcatcttcatctaattagtcccctttgtgtttatttttgccttcattcactcccatgtggggccttgagaattaacatcttaagttgcctcctgctccctgcctcccactcatcgaggatgctctgactgctcactgcctggatctttcgtcctctacagaaccagctgggctccatgaggtacaagatttcttagggcgaatccaattccatcaatacctggggaaacacaaaaacctggtgcagctggaaggctgctgcactgaaaagctgccactctatatggtgttggaggatgtggcccagggggacctgctcagctttctctggacctgtcggcgggtgagcagtagggcagaggtattaggaggttaaggcttgaccttgttgactagctttttacatgtcagttagtgtgacaaatgacaaaatgcagagacactataatagcatgacagaataagggagtatgaccatataatagaactttttgtaattatagaaatattctataactgctccatccagtatgataagccactaatcacagatggcttctagacacttgaagtgtggctgatgtgatggagaaactaaattttaaattttatttaattttaagtaatataagtttaaatagccacaggtggctaatgagcagagagtggacagtacaagtttagagcatggactttaggcttcacctcctactagttatgtgactgtgagcaagtcacctttctgatcctgagttttctgaatctgtaaaatgggagtaataattattacaaaaaatacaagaaattatgtatgtgaaaacatggccatggttggtacagagtaagcactcaaaatggtagctgttataaagataattatataacaattatctttatattgtttatatataacaattatctttatatgagtatttttggtaatgattataattttgttgcagttattaagtgtgttttccattctgtaacatcactataatatggtgggcaaactcagggagaaatttagcttgtaaagcttttgtagctcaaactcacgttttttaaaattaaagcattcagaaatttttagcctcaaatggatgtccttttccttaaaatttcccttgttctatattcctctttcagaagtgctacctgtttccctagtttctcacttgctagtgagcaagttcaatattctttgagcctccttcatatgctgattattgtacaactgaatgtgtatgagaaagggaccctgttattgtcttccatcctgtattgtcaataggacgattgcaagtatttaggcattttaaactttttaaagaggtcactcatctaaaacttgttttgtcctctaactgcactagcttctttccatttttaaaaaataccacgcatctctatttcagattatctttatatgtttttcttgttccaccaaacttctctcttctcttcttttcatagttaatgtccactcatccttcagatctcatcaatttccctgtccctgcaactcaatcaactctcttctgcccaccatcatatgctctcttagcactttgtacatttcctttatggcacttacagatatgtaaccattgatttatgtatgattatttgattctgattcacatgtgcctgtcacccaataagctccagaaggcagcagccatgctattttactcatgcttgtattccaagttcctaacatggaataagggacatttcaggcattcaataaagatgcattcagtttatgtgctaaattaatcatgaacacatgtgtgctcacatgtgcatacacacacaagcacacacacagagccctagaaaaattgctgctttattcagtggatagtcttatttatacttgtcttacctgctattcatctatgtctgtcattgtttttccagtccaatggatcattttatgtctctgcctatctgaaaatctcccacagcctcactttgaacactagtccttatatttttcaaagctttgataactgcatttcagagtatctctgcccaactttatttcttttccaaatctgtgagtgctattttgatataatggctttttttccctgtctctttaggatgtgatgactatggatggtcttctctatgatctcacagaaaaacaagtatatcacatcggaaagcaggtccttttggcgctggtaagatgaggcaacatgacaactgatggtgtgacgtttccttgttagccttgtttttgatgccatatttctcatattaatattctcaagtggtgtgtatgttttaaagaaaattagatagaagttagggggcagaaactcaagcatggataaattgtttttagtcccttccttagggatttatctagataatttaccacactattggtaatttcagggagaaagtagtcaacttagggtttatacaaggaacaggaaggatttttcagatttttcagggccaagaggtatacacccatttacttgataattttacatccccatttgtactaataatagaattaaaagagacagatagggaagcaagtagggagaagatatggaaagagaaactgaatgggtgaaaggcgacagaaccagaaggaagtatgcaattttatacctgagaaacaagaaaactagttcagaacatgtttggttggagacttgctttgatactgaatgtgacagggagtacatataattataaaagattaaggaacaagtggaaaaggatgaatgagaagagcacagttggataattcctttattttaaaacaacttaaatatttgtttatttatttatttattttttgagatggagtcttgctcagttgcccaggctggagtgcagtggcacgatctcggctcactggaagctccgcctcccaggttcacgccattctcctgccttagcctcccgagtagctgggaccacaggcgcccaccaccacgcccggctaatttttttgtatttttagtagagacggggtttcactgtgttagccaggatggtctcgatctcccgacctcgtgatccgcgcgcctcggcctcccaaagtgctgggattacaggcatgagccaccgtgcccggcctaaaacaacttaaataacgagataagagaaagaactcagggtttaagataaaaaatttacctttaccagaattacccaggaagtttatatgtctatttctatgaaattatttaaatggttgtgtttaaaattaacatttgctatggaaaatcggggttctgtgaagctactgttttaagtatttgatatatcttgctactttgaggtgtgaaatatagggatgtaagtggaatcaggaaaaggttagaaaaaaaggattaaggtgggtaaagagtaatagttatggttgaagctcccatgggacaagggagagtacacatcatatacgtgaatattgtctatggtgtttgaatggcctcgttgatatgttcccttgataaagagtgtcaggatacagcctaccctgtattcagaaccgcaattgcagaggcgccgtccagggatgaattggtcaaattggtgcattcatcaggaccctatgctacctgttacaaggcaatatcatgctatttttttcttacttttaacaagctcaaagtcagttacattctttaattcttatcatggcactataatttcttattttaaagcttcaccaggcacagaaaactgctagttttctttgtcatcagtgattggaaattatcacctttaccttctaattttctataccatccttttttagtaatcacagccctcaatatctagatcttcagtcatgtatagttttgcaactttcttcttatgccttgaataggttgatgccattggaaattactccaaaaatcaattatcatagggtgccatggctctccgatgctctgttggctgtactagaatttgatacatcttaaaaatgtcggttaccaggtctttcttcctacattttggtttattaaatctggggtgaaaatcttatgtttaaaaagctctcaggcaattccaatatgcagactgacttgaaaatttttagtagagtttatatagtacatcctatgaattataatacctggttctggtcactactgcttaataactctgtggccttttgtaatcatttagatttatctaaaagaaaatttctgaattcaacccatgcagttattttaggggaaaaagtgagatatgtatatacatttttcattatgatactcaattttggtacgtattacattgttttgaggactactgctagaaacttggaatcaggccgggtgcagtggctcatgcctgtaatcccagcactttgggaggccgaggagggcagatcacaaggtcaggaaatcgagaccatcctggctaacatggtgaaaccccgtctctactaaaaatacaaaaaattagccaggcgtggtggcgggtgcctgtagtcccagctacttgggaggctgaggcagaagaatggcatgaacccaggaggcggagcttgcagtgagctgagatcccgccactgcactccagcctgggtgacagagcgagactgtctcaaacaaacaaacaaacaaacaaacaaacaaaaaaagaaagaaacttggaatctactcccttttccagtgtctagctgggtcctttctcacgggaaacgaaaatcaggcaggggtcagtgtttgaaacagaggtgattatattttcaaaatccagtattaatgtcatttgaattatttgctcaatttggtaatcctaaacacaatgcagaaatgtgcagttcattagcatgctttggaagtgacatatcattattagtgagacttgttcagagtagaaaatgtccttgtgtttttgaagattcctaggactgcctctccttgtctgtgacccaagctgtgatctcagacagctgatcatatttgattttatcttgacaggaattcctgcaggagaagcatttgttccatggggatgtggcagccaggaatattctgatgcaaagtgatctcactgctaagctctgtggattaggcctggcttatgaagtttacacccgaggggccatctcctctactcaaaccatacctctcaagtggcttgccccagaacggcttctcctgagacctgctagcatcagagcagatgtgtacggtttattcctggactctgagtttactttcttcatgacttgggtgttgtccctgaatatgatttgatctgttgccaattctgtatacgaatataatctctacttagaaatcagacatactctcaagcagaaatgttatgtgacagagttcatgtttgtcatctgtctgcaatcctttttggtactttttcaactttttcttttcttttcttcttttcttttctaagacaggatctcactgtgttgcccaggctgaagtgaagtggcatgatcacagctcactgcagcctccaccacccaggctcaagcgatcctcccacctcagcctccctagaagctaggactacaggcatgcaccaccctgcttggctattttttttttcttttttttttagagacaaggttcaccatgttgcctaggctggtctagaagttctgggctcaagtgatcctctcaccttcgcctcccaaagtgctgggattacaggcatgagcaaccatgcccagcctcaagtatttcttctgtattagattagcagccttaattagaaaaaaaaaaagtgaaaagattattcacatcaatatctgaggacttaatctagtaaagtctgttttatctgaaggaataaccaaaaggccagttaacccatacattgttaaaataaaaagaaatatacataccttcaataacttattttaacataaaacttataaatgtacattatctgtttttttcaaggaggggcaaggcttctttttataaggatgagtttcccaaatgaagttacacgttgttcttttagtgtaaatagtatcttttagtgtaaataaaaatgatttatttttgagttccagttcagaatgattttaggtagcatgagaaacctgaaaataattgtgaaattgtttgactgcagacttttgatgttacttttcccaattttctaagttgtctccctcacacaatttgacaagactttctttttcagcagtttatttttataaatcattttcaaaacattcaacttagttttcaaaacattcaacttccttcaaactttgtttgaaggaagataacacttttttgcatttaatccatatataaaatacctaattgattatataactacatataattgcaattacatgtaaaattggcattaacaggatcataaagaatcacaattgacttttggtagccatataactcaattgcttggagaagtgcattgatgtaatgtagaatatcctgctagccatgaatgccatgagcagcagaggaaatttagaatatcagttaatatgatgagtcagttatgagatttccattgttgcttcactgacatctgcttttcaatagacatctgggggtaataaacttaactgtaaaatattaatcattcaataatgatattacagaatagtgaactatacacctctcaagtcatattgcttaggcaaatacctatttcaactatatataaagcttgccctgttaatatttttcctaggtttgggcaattaaatctactgagaaaatagtgactaaatgataaaacttggttgaatttgtgctaagaataaaggcaagaatttcagcagagagggatggaaaggaagaaagagacacagagggaatatttttaggtaaatgtgcttttgtgattgaggtaaatgtgtttgtgtggttacatgcacacacatttgcaaataataacaaacatctattaatttaaaacacaggagagtaaatagagatataatttcaatcttaaaagagattcgaacctatggaaattgagcagaaatgctttctaatggctgttattttgtttttcagacactcatccttgattctccttcattgcctttttcatggggctcttattaaaggcttctgacacttaaatgagctctctttagaaaaacagaaatagaaattaaatagatggctttgtttcttttacagctggtcttttgggatcctgctctatgagatggtgactctaggtaaggatgagccccaaaatagtgtgtacctgtatgcaaatatgcaagcgtgtttatttaaggggtggatgatgtatgctttctgaaagggtttcagtacagtgctgaagcttgaaatggactgacatgttatctaagcctgattcccgtgatagtcatataaagtgattattttctccttgccccagtcccttcttccctgtccttttttacctttcttttgctctcttcctctttattttccccaaaatattaccaaatccaagggatgttttcaaatcccaaggataattcccagagtggtcttgcataaacataaaaatgtttactccagacttattaattcatttgactgagaaactgcacactttcccatgtatggagagtggaggacaggtcttatgtcttactttgtcttatttgatcactttcttagagattcaagattctcctaacttatcaggtttttttctccaaaacacctttccccccaattcactaaattatatccatatttgatcaccagggagcaactgaattgtatgtagtatttttcctatggctatatcttttgcaagcaaccaacccaagtggatgaagaatagtgttagttacagttcatattttagaggaccttaaagttctcattattttcgtaatgacaggagcaccaccgtatcctgaagtccctcctaccagcatcctagagcatctccaaagaaggaaaatcatgaagagacccagtagctgcacacataccatgtaagtggtttttaaaggcctgctcctctttcattccaaatgttgtttagccctctatcaatcgtgcccttttcaaagggctcagatgatcctcacctgtgtatatgtacccatgtacagcttttaaccaaacccatgcagtaaaatatacctatctcatatattatatatgcatatatattatatatacatatacatacacacactcacacatactcacacacatacacacacatacccccaccacacgctgagaactatatcaggaatctaattttattatagtttagttccatgggaagcttctaaaataggtaacaagtaaactaaacccaatgcaagtatagttgtgtttagtctaaatgtcagtcttctgccagccacagttcagacagctgtcataaaagccattgcactagagttactcattcagagtataccagttcttatttagtatttaacttttaaatgactgtctccctgtttttccaactctcagtgtgatagaagccaaccagaggaaggggagataagaagaaattagaaaggcagaaggaggatccaatattgtcagcagattgggacagttagtgaaccaacctagaggcaggaaatggaaaaataaaaaattacatagactgttattaccaatgaagttcaaaaaggaactgctgtagaatgtaagaaaaggttaaattgtgtatacggaggcagcagagaatatattaatgtttttattagaattgttgctattttgtaagttttttatcattgaatgggtaaatttacagcacttggttttccttatgataaataattactgcatcaagcagattaaatttaagtatcttaattatatatgagtatacacatacacacacacgcacagaatatagtgatggagctaggtacaatagaaaaaaattgatgacaaacatttctatgtgttaaaggctggtcttaatactgggaaagacacctaactgacaaaatacctgacctggtaccacaacctctggtacttgtaacacagccttgtcatctgcaattctagcagcagcttctaggcacaagtattaaagaacataacattttgatgaggagatatctgaaacatgaaaatcaacctaaagtatgcagcagtatacatgattaaaagctccgtctcatatcagagtaaaaatgacatgtgttcatttctacccagccctgttactttactgcacaatgcttacaacgttacagcaaacaatatgtagtgataaaactgtcctgtcataccctagtttggaaaatgttaagtcattcctattatacaagagcacttgttgagaaagtgctattaagagacttgatataaaaagattgagaaggaatatcactctctgggaagaatatgagtaacagggcaaacagaagacaattaaagaattgcagagttgtttgttaaagtttgtgaggagaggagacatgctccccatacatttgccttgtcaaggaagtcagtttctcttgtttccctctcaggtacagtatcatgaagtcctgctggcgctggcgtgaggctgaccgcccctcacctagagagctgcgcttgcgcctagaagctgccattaaaactgcagatgacgaggctgtgttacaagtaccagagttggtggtacctgaactgtatgcagctgtggccggcatcagagtggagagcctcttctacaactatagcatgctttgaagagtctcgggcaagaaacattcatgcatgagtatatgttcttggaatcaattcctctaagaacagagaatggtctttcccagggacacaaagggagaaatgggacatggattcttgatcttcctttacacatttctcgggaaatctgaaatgatgctggatgggactctacacatcctgagctaagacatactgtcagtctcacttctgctgtcccagtcctagaaatcctgggtagaagtggtggacctgtgcaaaggaggttttagaactctgcagtatttgttggggcatggcacaaataagctcatccctcccgtccgaggctagtttcctctggaaccacatttttatctagatgaaaatttggaatgaaatgaaggaatagaaatccaataaaagagttgaagggaaagaaaatttaaggttcttcttgctcaggattacagatatggaccaacacctccttcaagaaaaggtggtaggacacaaagttcttcagtcctgagccctacatgtggggttggaggagaactataacggaaaaacctctgagtttcaccttaggtatagataaaagaaagatggtccccttttatctgattctgagacaggtaaattctgtttgttactacgtttaattagaaggtggaggagtcatttcatgattaagaacattcaacatgtattgttcattaagctagcttcctagttccgattagactaaggagactaagcctagagagtcaatgttagaacagtgaaaagaattctgtgtgtgtgtgtgtgtgtgtgcacaataaataggaaatgtagaaaccaagcaagaaggcttagtagctcagtctttaacaagggctagaaaagaatgtaatctgatatggaaggatagcagcttctaattttcaatcatctgttgatatactgtgaaacttattttattaaattaatatttattaaatggaaatatgcttttctggtttataactactaaaaatatcatagggaggataaaagtaaataagtgaaagttaatgccaatagaaaaattcaagagataatgtacaatgtcagaaaagggattctttatgtgtaaatggggataatacctatttcacaaggttgttctgaggattgatacgttttgagtatgtatttgtacactatctggcacatatgcgctcaataaacgtgtttctcctttt

SEQ ID NO: 766 - DNA, 22583 bp, Homo sapiens
aaacatccagaatacatttccaacaagagcactggccaagtcaggtaagcaagcaaattttccagattacttaatcagtggtcaagctttgctatatttaaataatcaccttttgctatttaaaagtgaagctttcagtaaagggtaggaaagtgaaatgaatttttatttttcttcttttactgaactggatttcctttgctggtttcatagttttatctctatttatattaatggtattagaataaattgacgtcaaccacaaaaacgactctttgaaaagtattctacaagtaatgatagctcttctttatattcttttaagtcttgttttattttaaaatataggaacttataatatcagttacttacgttaaattacttttgaaaaataaaatactaatgtcataaaatgctaattgaccaatgtttatacaatctaattgctgacatatggttatgtgcctcccaaatgcattttaagctgctgtaggcctgtaaccatgccacatttatctgtgttcccccaagtagcttaaccttgcaactgatactaaaggaccctcagcagtttacactatattttaccaaggaaagcgttatttattcaaaatctacagtgtacaagttgtactgctttgtcacagaatatatttaatatctattttataatttatcaatgtaaaaccagaaaaccaagatttttattttttaattagaaagtatttgacaataatacataaagacttgaaattttaaagaaaaaatggttcccgcttaactctaagcttcgcagctttaaaatagcaaaaatgatgaggttatgctttttcttttttaaaatgcagattccacctgcttgtctctgtagctaacatagaaaaatctttctaaagattccttccagattgacttttcttaactcttctttatatccaagatccctggaagaattttaatgacgttttggaccctattcccacggaaaaggaacagaggcagataaaattttgcacacaatttccaggggttttgagccttctgtagctcagccacaggccttctagaagcctgctggatccaggttaagatcctgtcctaggtggttgctttagttcctccactgcaactcccaacctgtctaactaaggctgccttccctgggttgagctttgtgttccagagtcaactgtccctgtcctgtactaaaatccaccctgtatttgtttcagtctttaaagtacaagatgaccaaggccttaaggtacaagatgacattctgaaatgttttatggtttaataagttatgagaacttaaactgaaattcttatcaggcaccgtgataattgtttaacagggtttttatatgcctggaaagaaaggacaggaaaggaggggaaaggaggggagaggaggggaaaggaggggaaaggaggggagaggaggggaggggaggggaggggagaggaggggaaagaggaggggaaaggaggggaaaggaggggaaaggaggggagaggaaaggagtccgggcgatgtagctcacccttgtaatcccagcactttgggaggccgaagcagttggatcatttgaggtcaggagtttgagatcagcctggccaacatggtgaaaccccatctctactaaaaatacaaaaattagccgggcatgatggtggacacctgtagtcccacgtacttgggaagctgaggcaggagaatcgcttgaacctgggaggcggaggttgcagtgagtggagatggccccactgcactccagcctgggtgacaagagcaaaaaaaaaaaaaaaagaaagaaaggagagagaaagaaaagaaagaaagagagagagaaagaggaaggaaggaaggaaggaaagaaggaaggaaggaaggaaggggaaagaaggaaggggaaggaaggaaggggaagggaaggagggagggacaactggggattagggagggaaataaagtaaggttaacctggagtggtaactattttcagtccatagaggggctgcaatagatacaccactgggaaggggaaaacagtataatgggaggaatgaggaaatgtctggagaaatctagaatctgtaaacttctttaccaccaaattgttgttctcctccacgactgcggttgctactttacaataactaggtgattaaaattgccaaatgttttaccaatgccaaaacattgtgtcttatatatcttttcattttccacaatgcctactacaataaaatatagcaacatctttgtttgaacagaatcactaaagaatcagtcactagccattttggctaaggaaattttactattttggtgatgagttcaatactaaataatgtaagccaataggaaagacgtcttaaaggaacttcaaatcaatgtgaatgatgtctgtatatttattttatattttgaggtaaagtttcaaaactgcatgagtcaaccattttcaaatcagttttatatgctaatgctgtaactaaacatctcacaagtattaaagacttcctgtaatatatttatcaagtggtttatgaccagatcaggcccaactttggacttcagtttttatcttaacgtgcaaagtataaaagatgcacattgagttaagaatcagtttgaattctagctaaccaggagagaatgtaatcatgacagtctattcttctctatacatatgtctaatttatagtaatatgatagtacttgatttttataaagagctgtatcataaactgaagggcaaaagtctgagtaattgttggaaggatgagaaaggtaagaaactataaaggaactgaaggacaagaatcctccatattctatttttcctctgatttctattttaagcaatatttattcatgtataatcttatcttagtatagagttaaaatattttgacctattagatgaaggagaatcaaaaggcaaagaatatttctgcatgctaaaagtcacttcatagtttacaagacatcaaacaacatgatcttatttgagtttcgtcttgttggtgtgaacactacagggcggttcagaagcaggcttcgtgtgccctgatccagctcttttttaattatacagcaccatgcccaggaggctcagaacatgacttctcaccaactgagcatgtactgagttgattaagtattttaaaaataaaatgtgaatgaaagttctatgtggttggttataccatgtcaaaccaaaaaagctgaacagtctgtcatcacagtattggtccaactcttagcaaatatcttctaataatagcttgaagtaattcactggattctgagaattcctttctgtcatctagcttcttctgagagagtctctagaagacatgatgctacactcagctttgggtctctgcctcttactcgtcacagtttcttccaaccttgccattgcaataaaaaaggaaaagaggcctcctcagacactctcaagaggtgctgtaatctcattttattttctaaactcagtcatttggattgctttttaaaatatctggtgtcttcactcatagtctaattataaagcaaattcaactaactgaatgatttttgttgtgtgtgacttcaaaatggattttttaaaacagaaggaatcagtttattttaggcagtgaatcaaatcaactagcaaacaataacataaatttgcattatcttttgccaaaataatggagaattggctcgctgtctataactttggtaaccagagtcctagaaaataatgattgattgctgcgtcatattggtgtcctaatagcaatttaagattcctcaaaatttgctcaaattcccagtcctctatttcccagtcctccaaaaaaaaaaaaattggaataattttatataagccttcccagaaaattatactataccccaaactctgagaattcggggtaactaagtctttgctatattgactctggaagacagtggttttagacataatcaaggattgccggtggctacatgtttagaaacatttctttttgtacttactgttttacttggcccaagaaacaaatatatattcatctgtaaagaaacattttattaaaaaaaattctctctttttttttttttttgagacggagtcttgctctgtcacccaggctggagtgtagtggcacgatcttggctcactgcaagctctgcctcccgggttcacgccattctcctgcctcagcctcccaagtagctgggactacaggcgcccgccaccatgcccggctaattttttgtagttttagtagagacggggtttcaccgtgttagccaggatggtctcgatctcctgaccttgtgatccgcccgcctcggcctcccaaagtgctgggattacaggcgtgagccaccgcgcccggccaagaaaatattctcaaagttagtttctatatctctaagtaacagaagtaggaacagaattatttgtccccatatagctattcaaaatcagcagtattaccacaaagtacttgaccatttgtttgctccattcatattaccactgcaaatagtagtcaagtgccttggagtaatactgctagttttgaataaccaagtgggaacaaataattctgttcctacctctgatatatatataaaatatatataattataacatacaaattatatattatatatactatatattatatataatatatatcatagtatacatttgtgttatattataataaattatatataaatatatgctataattataaatatatattatataatttcaaattctaaaacactgacttgcttcccaagtacattcatttcttaacagatgtattgagtgccagccaagtgctcatcaatgtttacctaagctaattaactctacttcagtttaacaaacacacaatctatatatacagaaagtcaacatatttttgcaaaagaaaggaatgaaaaagttgaaatattttcctaaacataactctatctctctgtataagcataactgttgtaaaacaatgagctcagtagccctaaagtgacaaagactaaactagttattgcccttaaagattttccatgtctgcattaagcagcactgtgataactatacgtcaaggcatcaacattctgtgtgctcacttctaaatatttatttaaaactcttgttgaatgttttgaaaaaatatattacatttgtatgccctattttaaacaacttaaaggttctattatttcaattgataagaaactaatttaacacagaagatgactgatattagctgagaacaccattattgagaattggtttatatttggcaaagtcttttaccatctattgctacatgggagataatggagagaatgaggctcagaatgaatgaagattaaaggtaggggtgagtgggagaagtctggatacagtataaagagtggcatatggagccccttagagcacagggcagcactagttaagtagagaaggcagtaaggagaaaaggaagattaattagaaaaaggtagaagaaggttcagggagaaaaaaatacacacacatagaatgatccaaaaaaaatccaatttcctttgaatcagaattgctgagtacctagtccagtgattggcggatagtaaatatttaataaatatatgttagataaatgaataaaatctcaaaagacaagaaaatatagccagagatagagatagggctagaattagagtaatgagcagaagccatgaagtgcatttaaactgtgtaacagctttgacctattgtgattataacagagtaaataaaaaatcattataatgcaatatggcttttctacagagctatggacaatttgttgagaatagggattatattgctctatgtttgtattcccactgctttgtggagtaagttatgcagcagatgttcctttactgtttgtggaactaaattgagcaggagcagagaatagaaattttccccactgctaatgctccatcattgaatgatatttgcaacagaagagggaaaattcagcagaggcctcgtctcacttgctgttttagaataacttttacttaatgcaaaatgtgatgtatagatattgcatgtgttcaaccaaagttggaaagagaatctttcaggattattacagagagcaagagttcctgttaagatgtggcattaaactaacaagagatgtttttcaatgttaagattttaaatcaggcaaaaaaaaacaaaaaacaaaaatgttgctggtgagtatataaaatgatgcatctactttagaaaataacccggcagctcctcaaaaagctaaatacagagtgaccatttgatcagcagttccactcctaggtatatacccaagataaatgaaaatatataccactgaaaaacttgtatatgtatgttcatagcatcattattcataaaagacaaaaagtggaaacaacccaaatatcattaactgatgaacagataaataaaatatggtatattcatacaatggaataatatttgaccataaaaaatgaattaaataataatacatggcactataaggatgaaccttaaaaaggttatgctgagtgaaaaaatctagtcacaaaagcctacatattgtatgattccatttatatgaaatgtccagcataagcaaatctatagagacagaaagtagattaggggtttcttagggctgtggcatttgaagaaaatggggagcaggtgatagctaaatggtatagggtttctttttgaggagatgaaaatgttctaaaattgatgtgatgatggttgcacaacttcgtggatatactgaaaaaagcacacattttctttttttctttttttttttttttttgagatggagtctcgctctgttacccaggctggagagcagtggcgcaatcttggctcactgcaacatccacccccaggttcaagcgattctcctgcctcagcctcccgagtagctgggactacaggcacatgccaccacacccagctaatttttgcatttttagtagagacagattacactgtattgaccaggctagtcttgaactcctgacctcaaatgatccacccaccttggtctcacaaagtgctaggattacagtcatgagccaccatgcctggccaaaagtatacgttttcaataggtgagttgtattggcgtatgaattttatttcaataaagctgtcgccagaaaacaaacatgaaaaacaagcaaaaatcatggaatcatatttatcaaattactatcatatttaccatgatattaaagccagaaactgtggtctgacaacatttgaaatgtacaagaaaacctgggcccaaactgacttccaaatattgctaattttcacattaattcaatctctctcattcgtagactgagacacttcctgaaaatactcagtaatgtttttggaggttctgcacattcttctacttgatgattttatctttaattgcttatacacattcccaactattcataccatttctttaaggctaatgggttctctctatattcattgctttctgttttttctctccattcttttgggtgtttccaaaacacatgcgttttattatgtctcttggccatgaaattcccacacaagaattttttccatgtcagaattcaaagcaaaacttggaattcccttatttcacaacgtatactgacttagaagaggtcaacatctcttgggacccaaaataggagggcattgtagagtacagccgaaaggattcctaataatattacaaagtatgcaaagatgaactgttactttccaagcgttcctaaagccacagcttttacattatccaaagatgtcctttcaatcagctctaatcataacaacatgtattgagtacttactgggttcaaggccatgggcctcgaggtttgaaatgcagtagcaaaacctcagtactgcaatctaaagggaaatcacctccatatcttgtgaaaattgtgtgtcctctgcaccatatgtcagccaacagcttgatggcttagttaaatatctgtaggtagatatctgattattagatacccatttccgagctcttctctagttctgggttactgcattgatttctctcttctatttcaggatggggagatgacatcacttgggtacaaacttatgaagaaggtctcttttatgctcaaaaaaggtaacatgcttctcagctcatttttttccttttatttgtagtagactcataataattgtacatatttatggaatatagagtgatatgctgatacatgtacacaatgtgtagtgatcaaatcagtgtaattagcatatgcatcacctgaaacatatcatttctttctggtgggaacactcaaaatcctctctactagctttttaaatatatacaataaactattgttaactgtatgtaccctatagtgctgtagaatactactcaaacttattcctcctatctagctatatttttgcatctattaatcaacctctccttatccttccagctctgaaccctccccagcttctaataaccagagttctactctctacttctattagtacaacttttttttaagctactctatatgagtcagaatttgtggtatttatctttctatatctgacttatttcacttaacacatcctccaggctcattcatgctgctgtgaatgagagcatttcattatttttatgtctgggtagtagtccactgtgaatatataacatgttctctttatccatccatccattgatggacatttaggttgattctatatcttggctattgtgaatagtgattccataaatatggagatgcaaatatctctttgatatactgattttttaaataaatactcagtagtaggaaagctggatcatatggtagttatatttttagttttctgagaatcctctatatgtttgcataatggctgtactaatttacattcctaccaacagtgtataagaattccctcttctctgcatcctcaccagcatttgttattttttgtctttttgataatatcagttctaactgtggtgggataatatctcattgtggttttgatctgcctttccccgatgattagagatgttgagaatttcttcatatccttggccatttgtgtgtcttcttttgagaaatgtctattcagatcttttgcccattttaaaatcaaatcatttggggttttttgttgttgagttgtttgagttccttgtatattctagatataggcccatgtcgaatgaatagtttgcaaataatttctcctattctacagtttgtccccttatgcttttgtttcctttgctgttcagatgcttctcaggtgacatagtcccatttgtctatttttgtttttgttgcctgtgcttttgaaatcttacccatacatttttttgcagggaacaatgtccgaagggcttcccttatattttcttctaggagtgttatagtttggggtcttacattcaagtctttagtccattttgaattgatttctgcatatggtaagagttaggagtctagtttcattcttctacatatggatatccaggttttccagcaccatttattgaagagggtgtcctttccccaatgcatgttcttgccacctttgttaaaaatcagctgactttaaatacgtggatttatttctgggttctctattctattccattggtctaggtttctgtttttatacaaataccatgctgttttgtttactatagctttgcagtatattttgaagtcaagtagtatgatgcctgcagttttgttcttttcactcagtattgctttgaactatttggagtctgttgtggttctatacaaatttgaagatttttttctttctgtttctgtgaaaaatatcattggtattttgatagagattgcattgaatctgtagattgcctttggtggtatggtcattttagcaaaattcattcttccaatccatggcatgggatgtctttccattttttggtgttctcttcaatttctttcatcaatgttttatagtttttcttgtagggatctttcacctccttggttaatatattcctaggtgtgtgtgtgtggtttttgtttgcttgttgtttttttgagatggagtcttgctctgtcaccaggctggagtacagtggcgcgatctcagctcgctgcaacctctgcctcccaggttccagtgattcacctgcctcagcctcctgagtagctgggattataggcacatgccaccatgcccagctaattttttattattagtagaaacagggtttcaccatgttggccaggctggtctcgaactcttgatctcaggtgatacgtccacctcaacctcccaaagtgctgggattacaggcgttagccaccacgcctggcctttttgtggttattgtaaatagcattgctttcttgtttctttttttcagctagtttgttattgttgtatagaaatgctactggttttgcatgttgattttgtatcctccactctccgttaattttaacagatcatatagatacctcattgatgaatcaaaaaaaagcattttagttttcaaaaggatgccacaagtatttgctctgctattgtatgccaaagggactaatagttgctattagaatacattttataaacaaaagctctaaatacctctgtattaatgtcttcattactcaatcaagcttttgagtatgttgtataaacaaagcagtattatttattaggcagtatacaagcttagacagaaaactggtttagggcagcagttctaaggcctgcctgtttgaatattagagcaatttgagtagcttttttaaaaatccaaatttataattaatcagtcaagtattccttgaatgtccactgctatgtaccagacactgttctaggctcaataaccaagtataccatttttattcttaaagacctactaagtctttgggaatgaagctgagaaacatattattaaaagctccccaagaatgaatgaaatatctaaagaacattctattgcaatactctttaaagataaattaagattccaaattaactattgtttcaatattggacaagcattagaaaagaaagaagtctacagaagaatctcacttccaaatatcggtgtaacaaacaaacaacatattagtaaggagcaccagcagaacatttaaaaatataccctgacaaattgagatttagcctgggaatgccagagtggtttaggattaagaaatgtactaattaaaataatttaatatttataaggagacaattcatacaagtatgtctaatctccaccaattctgaaaatgcattatagaataaaacatctatatttgaatttttaagactttgtatttgacaatattaatttctttaaattaatcccaacaacagcattccaacagtagcaacaacaacaaaaaaccaacattatgcttactgggaaaacaaatagaagtgtcccattaaagtgtggataagacaagtatatctacaaccacaacaattactaacatttttctgaagtactaacacaattatagaaggaaaaagtagaaaatgtagaaaggaaaagttaaaattatctttatgtgcaaatgataatttatatacgtgaaaaactaaaaaaatttaaatattcagaataacaaaaattctgttgaattagatgagaataaattgatatttaaaaattgactgcatttatatatagaaaaacacatccaaaaaaacttgttaaatacctcatttacaatgacaaaaaagaaaataccccagaataaacttgacagaagatatgcaaaatctataagaacctaaatacactgaaaagaaaaaagaaatttccaaaccaatggcagtgcatattatattcttggatagaaagacttaacatcataaaaatgccaattctctctatacttaaaaaactttttaagatgatcacaataaattgtgataagattttttaaaaagataattctaaagttgaaatgaaaaaataatagacatgagtagttaggatagttaggaacattctgaaaagagagcaatagggattaggccttaatcattattaaacattttacaaagcaataataaacagtatattacttgtaaataaataaaatataataaaagtatagaaataaaactttgaatgtaaatggatttggacctccaatcaaaagacatagagtgactcaatggattaaaaaacaggttccccctgccccctgcaaaaaaaaaaaaaaaaaaaaacaaactcacaagccccaactataggctcaagcgatcctcctgcctcagcctttcaagtggctaggactacaaatgtgtgccaccacatgggccaatttttgtacttttggtagagacagggtttcatcatgttgcccagactagtctcaaactcctaagctcaagcaatcctcctaccttggcctcccaaagtgctgggattacaggcatgagccaccatgccaggcctcacttcaccttgaaggatgtttattaactgcaattgaaaggatcaaaaaatatatactatataaatggaaacaaaacaaaacaaaacaaagtagctatacttagataaaacagactttaaatcaaaaaatgtaaacagaaacaaagaaggtcattatataataacacagagattaatttaccaagaaggtataacaattataaatatatgttcatccaacatcacagtacctaaatacataaagcagatgttaatagatctgaaaagaggaatagattacaacacaataatagtaagggacttcaacaccccactttcaacaatgaatagatcatccaaaaagtcaataaggaaacattggacttgaactacactttagaccaaatggacctaacaaacatatacagagcatttaatcaaacagcaagagaagatacgttctcatagcgtaggaattattttttagaacagatcacatgacacatgaaacaagtctaacaaatttaagaagacttaaattatatcaactatcttttctgaccatcaacagatgaattgataaaatatggtatatgtacacaataaaatactattcagccattgaaatgaaggaaatcctgaatagctatccaaagagcctatctcctttgatgctcacaatccacttaaaattaaagcggtatttaaaaatcattctatatacccagacattagtctgggcaatgattttttttcatatgacctcaaaaacatgagaaacaaaagcaaaaataggcaagtgagattacatcaaactaaaaagcttctgtacagcaaaggagacaataacagagtgaagaaataaccaacagaatagaagacaatatatgaaagccatacatctgaaaagaagcaaatatgcaagaaactcaataacaaaacaaaaatggaatttgtgttttaaaaatggacaaaagacctaaatagacatttcttaaaagaagacatacaggctgggcgccgtggctcatacctgtaatcccagcactttgggaggccaaggtgggcagatcacttgaggtcgggagttcgagactagcctgaccaacatggagaaaccccatctctactaaaaatacaaaattagccaggcatagtggtgcatgcctttaatcccagctactcgggagtctgaggcaggacaatcacttgaacctgggaggcggaggttgtggtgagccgagatcgcaccattgcactccagcctgggcaacaagagcgaaactccatctcaaaaaaaaaagacatacaaagggccaacaggtagatgaaaacaatacttaacatcactaatcatcagggaaatgcaaattaataccacaatgaaataccacctcactccttttagaaaggctattatcaaaaagatgaataatagcaagtgttggcaagaatgtggagaaaagagaacccttttacactgttggtgggaatgtaaattagtacagccattatggaaagcataatgtatagagattactcaaaaaaattaaaaatagaactaccatatgatccagcaattccctgctgggcatgtatcaaaaagataaaatcggtatgtctaagagatatctgcactcccatgttcactgtcatttgcaacaacatagaagaacctggagaacattatggtgagtgaaacaagccagatacagaaagacaaatgtcacgtaatctcacatgtgtaatctaaaaaagtcaaactcatagaaacaaaggaaaatggtggttactaaagtctgggggtgaggatggggagttcttgctcaaaggacacacatttcagttaagtgaaataaattgaagagatctgttgtacattgtgggaataatagttaataacaatatattttatacatgaaaattgctgacagtaaattttaaatattctcaccacaaaaaataagtatgtgagatgatgaatatgttaaatagcttgatttagccactgtacaacatatccatatatcaaaacagcatactgtacaccataaatatatacaacttttacttgtcaaataaataaatagattattgataggtagttgacaaactccatagatagatagatactacaggaattttttaatacaggaagtggtattttaaatcaggaataggggagacagattatgtaataattagtgtcagaagttgatagtcatctgggaaaaacaaataaatttgtatccatatctcacatttatgcaaaaataaattagaaagatataattatgaaaattaaatcattaaggtgctagaagataccactgcaaaattttatttctttaaatgcttggaataggggagagccaagattatagtgaggcaagaaagatacctggggtacaaaaataaagcctctaattttagtcctgtagatgctcccctggcctcatgctagtgctgtctgctaggcttgagcatagccaaacaaagaaaaggagaagataaaagaaaaagtctaaaaagaaattactaatattttcaattacacggaattttctggataaccaaaaacttacaaaggaaaaatattcttttaaatggaaaactgcagcacatattagaagggtgactttctctaatatacaacgtactcctatatattaacaagaaaaaggtcaacaagtcaacagaaaaaaatgagcaaagaatatggaagttcacagaacagaaaaataagtaactcaaacatataagattgactattttttataagaaagacaaaccacattcgtttccctcttttcacctgttggataaaaaaaatttaaactaataaccagctttagtgagaatagcaaaaacaattactgctcacactaccagagagaatatgaattggtacagcttctatggagagtatatatcagaattataaatgcacacactctgactcagaaattctacttctggaaatgtattcacaaacatacccacctatgtgcaaaatcattttttaaaacaacagcatggtctctcatttcaggaacctggcatcttcagggacagttacctgctttttaaaggaggtgaattatagtttaatgtactacaggtcctatactatggatgggaactattacagtttataatgtcaaaaacttttcttagaccaaagatatcttccacaaaggtaacagactggattgacccatcattcaatgattttctagagtatagagacatctctactattactgccacatcattaggtgtgaataactcaagtcatagagaaaaaaatgagccttctacattagaaagtaagatatttccagctagaaaaataggaaatctgtcttccttagaacagatatatggtttagaaaattcaaaagactatctgtctgaaaatgaaccatgggtagataaatataaaccagaaagttagcatgaacttggctgtgcatgaaaagataattgaagaagttgaaacctggtaaaaagctcaagtcttagaaaggcaaccaaaacaggatggatctattttattaataacaggtcctcctggatgtggaaagacaacgaccaaaaaaacgctatcaaaggagaatggtattcaagtacaagagtggattaatccagttttaccagatttccaaaaagatgatttcaaggaaatgtttcatactgaatcaagcttccatatgtttccctatcagtctcagatagcagtttgcaaagagtttctactaagagcaacaaagtataacaagttacaaatgcttggagatcatctgagaactgataagaagataattctggttgaagatttacctaaccagtttatagggattctcatactttacatgaagttctaaggaagtatgtgaagattggtcgatatccttttatatttataatctgtgacagtctcagtggtaaaaataatcaaagtttcttgttccccaaagaaattcgggaagagcattctacctcaaatattagtttcaaccctgtggcaccaacaattacgatgaaatttcttaatcgaatagtgactatagaggctaacaagaatggaggaaaaattactgtccctgacaaaacttctctagaggtgctctgtcaaggatgttctggtgatatgagaagtgcaataaacagcctccagatttcttcttcaaaaggagaaaacaacttatggccaaggaaaaaaagaatgtctttaaaatcaaatgctacgctgtcaaaatcaaaacaaagaaaaaaaactgatagggtttttgaaagtcaagaggtccaagctactggtggcaaagacgtttctctgtttctcttccgagctttggggaaaattttatacagtaaaagagcatctttaacagaatcagactcatcttggttgccctctcatttatcagaatatgaacaggatacatacttgttgaacctgaggaggtagtagaaatgtcacacatgccaggagacttatttaatttatatcttcaccaaaactacatagacttcttcatggaaattgatgatattgtgagagccagtgaatttctaagttttgcaggtatcctcagtggtgactggaatacacgctctttactcaggaaatataggacatctatagctacaagaggtgtgatacattccaacaaagccggaggatatgctcattgccaaggagaaggatcaagtttttgaccctcgcacacaccgcagtggtttctaatacataaaaagtatggggaaaattgcctggcagcaaaagcactttttcctgacttctgcctaccagctttatgcctccaaactcagctactgccataccttgctctaataaccattccaatgagaaatcaagctcagatttctcttatccaagatattggaaggctccctctgaagcaacacttcggaagactgaaaatggaagccctgactgacagggaacatggaatgatcgaccctgacagtggagatgaagcccagcttaacggaggacattctgcagaggaatctctgggtgaacccgcacaggacacagagctggaaacctggtctcttcctctgagtcagaatagtgccagtgaactgcctgccagccagcctcagctcttttcagcccaaggagacgtggaagaaaatataataatagaagactatgagagtgatgggacatagaagccagcctgctaatcagattgctacttcacagattcatttttgtttcattcagtggtacttcagcagagttaatatacttctctgatgaattacacaacagtttgttaattctccgttcctgtagtctttcatcacgaaaaactaactcttctgtcaccttgaagtaaatagaagatcaagctttcaagtaatctctgaatgtttttctgtaggatttattaaatctatgagtggtttaaggagaggtcagtgtgtataaagtgtgtttgaacattatgccaaatatcaaaatgtgaaggactaattcagaatgcaaaaactttatggggggctgtaaatatgaactatacaagagtttaggatgcaattatgggtgtaaagaaactgcgtgccttaaaaaaaaagcatgtttagcaaataagtgtacaaatgtaaatgtttaggaacaatctaaacacaagagattggaaacaatttaaatatccatctttggggagactaataagataaaatattaatataatagaatataatataaaagaacagtggcatatctaagatttatattttaaaagcaaaatgtagatacttgtgtgctagtatttttgttttttaaaaagaaatacatacacataaatgtgaacatgcatctgggtatatacaatatataaacatattcatatagattttcagttatatgacctgaaaacctctgggagaaaatataagaaaaagtaatacagcatagttatagaagttagcagtaggaggaagaatttttatctttttaactttttatggttaaaatcaaaatgaccccccaaaaatgtatgaaatagggaactcccactcaggttgtttgtatattctgcaacgtgcaagaatgaaaggatgtgaaaatagccaaatattaacagcttttttgtaaaaactttttaaaaaactaaatgtaaaagtctttgactttcctgaaatcttatactaagtgttcattggaaatgaatacattgttcataataaccctttatctctggatacagaattgattttctctaactgcactatagagtacataagaattacctaataagtttgttaagctacagattcctgaaaccacccctaaccccagagattctgattgagtgggtctgggatgaagcctttggttttttgtttgtttgtctgtttgagacagagtctcgctctgtcacccaggctggagtgcagtggcgccatctcggctcaccgcaacctcacctcctgggttcaagcgattctcatgtctcagcctccagagcagctgggactacaggctcacaccactgtgcccagctaattttggaatggaggctttcctgatttgggaacggagcctttgaatttaaattcctaataagctacctagtgatactgatactatcagttctgaggccacaaatagagtaacactgctattgactatagtgctatgatttgtaaatctgagattactactgtaagccttattgaagctaataaaattttaaatctaactctactgtatattttgacccaaagttaatcatttgacttaattccatactttctttgtttagtaagaagccattaatggttattcatcacctggaggattgtcaatactctcaaggtaattttagcccctgatatcttattataatatataatatttccaatataaaataggaaaagtgacctggtaataatagctaagaaggcgctcagcaaatcccattaaaaaaaatagacaactgccagagtaccatcattttactaaggtgcttaaagaccacaatgattgttaccaatctactgaatatttctattatattcccttgggaattacatattcctcttcttcccatgaaaagaaaggggtgagctgagaaggtgtagaaacactgaaaaaaagtcgttgtcttaaccaatgagtcaatgagttacataaaattataaaaactagtgtcttcactgtgattatcctttgatgtctccttgaacagactgtccctcattgctttccaatgagggacaaagtggcaataggccaatgaactattaatatttacacctgagttatatatgcaaacaaatgctaaatattagctttattttgctatgttacattaaaggtctcttgatccttaaaactaactggcaattttgttttcccctatagcactaaagaaagtatttgcccaaaatgaagaaatacaagaaatggctcagaataagttcatcatgctaaaccttatggtacataaactttgtgatgttttcttaatactataatttcatggaaattttgaatccgtttttttcttttttttttttttttttagacagagtctcgctctgtcacccaggctggagtgcagtggcgtaatctgggctcacagcaacctcagcctccctggttcaagcagttctcctgtctcagcctcccaagtagctgggactacaggcacctgccaccatgcccagctaatttttgtatttttagtagagacagggtttcaccttgttggttaggctggtctcaaactcctgacctcaggtgatccacccgcctcagcctcccaaagtgctgggattacaggcatgagccaccatgcccagcctcctttttttctatttttaaagcacaaagagctaaatattggttaatacagaaagttgtatggaattataaaaggccaaaatagaatttactgacagtcacacaaaatcatcttgaaactatcaaaaacaaatgaatccaataacattctttttttttcttctcctgctagcatgaaaccactgataagaatttatcacctgatgggcaatatgtgcctagaatcatgtttgtaggtatgtatgtgatctcatttcatcagatctacaaaattagtagaaatcagcattcttgcttttatttttaaatgctagttcaagtactattctttttaaagagaagtcatttctaatccaataatatcagctcttgttagttctacaatcaaaatccactatatctgtaatttgaaaattttaaatattttttcaaagcatgtatgctattaaatctatatcccaatgtactttcaacacagtgccccagactagattgacagagacctatgacacactaaaaggagaattcaggttaattcatgaactgacatgtatgaaaactaattttgcttataaattggtttgacatttgttttagattataaattggtttgacatttgttttagattaagaaacaaaaatgattttaagaacgttttatggatgtagccagaggccattatcctaagcaaatgaacacagaaacagaaaaccaaatagtgaatgttcacacatataaatatgagctaaacactggttacacatggacataaagagaggaaaaatagacaataggaactccaaaacgggggaaggagggagggagccaaaggatgaaaaactaactgttggctactatgttcactattagggtgttgggttcagctgaagcccaaacttcagcatcacacaatatatctgtgtaacaaacttgtacacataacccccacatataaaataataattaagtttttacaagagtaaagaaaagaacatgctaaattatactttcgtgacttggttttttccttgacagacccttctttaacagttagagctgacatagctggaagatactctaacagattgtacacatatgagcctcgggatttacccctatgtaagtattcacaaatgatctcaaacagtggtcatagctgacccctgactatttgttaagggctagtgaagccctacatcagtgcttctacacaccagtcactgaggctagtggtggtgtttaaatgccaacttctagctcccaccaaaatcagaattttgggggtacctcagaatctattttaacagggatgtctaagggattttaggattactaaattctgagctcactaaaaagaatatagtacacattaaaatgacacaaacttgagacagtccattctcctagtatcaaagatctcatgtgatttcatcaaatgatagtaaaatcatttcatctttctttaatgcctataagcaaggaggtacagtcttacctaggactttaatcctttttttttcttttttgtagagacagggtcttggtatgttgcccaggctggtctcaaactcctggcctcaagtgatcctcccacctcagcctcccaaaatgctgggattacaagcatgacctaccatgcctggccaaatctattttttacaacattcattatcaactatatttaataagacaactgtgcctgtaagatctagcaatactaatacaaagtgatgcattaaaaaaaaagaggtactcctcaaaacccctctgatgaaattgttcaacataaagttgaccaaccagctctcaatggtctaatccctaaatttacatgtacacttttagcatattctttaatgtcatagacgaattcccatgttcaaagctattaatttaaatgggccaatttcaggttctagagttaatagatcatagcatttgtactttcatttattaatagcataatatatattaactcttatttcagtgatagaaaacatgaagaaagcattaagacttattcagtcagagctataagagatgatggaaaaaagccttcacttcaaagaagtcaaatttcatgaagaaaacctctggcacattgacaaatactaaatgtgcaagtatatagattttgtaatattactatttagtttttttaatgtgtttgcaatagtcttattaaaataaatgttttttaaatctgagactgac

SEQ ID NO: 767 - DNA, 3123 bp, Homo sapiens
gtttccttcttgatccttcacaagggaagattttcttttttagaggtacagattcctcttagtcaagtcctgattaaaactccagctaagacattagtaagccttggttagtgaagtggcatcaggaagtgcctacattttcatggcctggtagcgttcagtgaaaatgttcattaacagacacaggccattcagtcccgaatcccaagacactgaagactctgtttgaatcagactcacgggttccttcctagccactctcagggacaggaatgcttctggtgaagaagttttcggtggtggttcatggagcttccctacaccaacttggaaatggcattcattttattggcttttgttatcttttccttatttaccctggcttccatctacactactccggatgacagtaatgaagaggaagaacatgaaaaaaagggaagggaaaagaaaaggaaaaagtctgaaaagaagaaaaattgctcagaggaagagcacagaattgaagctgttgagctatgatctcatagccaccgatatttctcgctaagaagacagaggaagcaatccatgggaactacttatccacagttacacaagaggaggggataatgaagaaagttaaaatcacttactgattaaacacgatgataataaccattaatgaactcaatactcgggaaaggcttcacatttctgggactcagcattatccaaaatatctattaagagccatacaccattctagctgcaattgattatacaaaaaaaaaaagaccaaagtggttacaataataaaatagaacacagagaaagaagaaaactacatgtgttacaatttggtaagataaacaaacaaacaaaaaatttaatcactttttttggtcctgcgacacacatgataatttttgtcttaattctcctaacaaatgataatgaaaagctataagtaactgtgttattgcttccgtatctgaaataggtgaaagagggaaaaaacactatatattttttcagctttacagaagaaattttgaaaggtttacattcaatggaaatattagcattgcctcagtaagctttaaaacacaaatgtctacgttttctgaagcaatatggtttacagagacatgagtgtttgtaaatctctcgtcccaatactatgtaaatccttaatgtgtaagcatccaggaaaatttgtcattctgtgtcctttattcatcctaaaagttgaaagttttctgttatttatatttttttttttttaatttgagagagaggctgggtgcagtggctcacgcctgtaatcccagcactttgggaggccgaggtgggcagatcacgaggtcaggagattgagaccatcctagctaacacagtgaaaccccgtctctactaaaaatacaaaaaattagccgagcgtggtggcgggcgcctatagtcccatcttctcgggaagctgaggcaggagaatggtgtgaacccgggaggcggaggttgcaatgagctgagatcatgccactgcactccagcctgggcgacagagcaagactctgtctcaaaagaaaaaaaacaaagagagagagagggtctcgctttgtcaccgaggctggagtgcagtggtgtaatcatagctcactgcaaccttaagttcctgggctcaggtgatcctcttgcttcagcctcccaagtaactgtgactacaagcatgtgtcatcacagccagctaatttttgtaattgtttgtagaaccaaggcctctctatgttgcctaggctggtctccaaatcctggactcaagcgatcctctgccttagcctcccaaagcactgggattacacgcatgagccaccatgcctggcctgttatttataactcttacaaacattaaaccatcacaatcaatgctggcagcattatcgtggcaggaaggaatccacaatacaaccaaagatacctacctgcatctcataagaatcatagctcaggtctccattgccacagagtttcagtcatgtgagagactccctttatctgtacttaccccttactgctcactttcaagaaagattcaataaagatggctttctgccatacagagataggcatactagtgtaaacagaatgcttacaaagttaaccaagtagtcacccaggtcagagtactaaacatttaaaagggctcactaagttagagaggacagagaatgggctttggagatgagcagatctgggtttgagtctgctccaacctttccttattatatgaccttgggcaaagtacttaatttctctgagccttggtgttctctctgaaaaaatgagcattttaaaaaatctttgctgggctgacaaatggatgagagatagtataagtaaaatgtgtaactcagtgcctaggatcgttgctgaataacgctacctattattattggaaagcattttgggacatttggacttttaagtttactgatacgttttttcagaaaagcagaaaaatcaacaacatggtttcaaatacttggatgaggctccattcactcccttagcccatcttacatatattactgcattgactggaaatgggaggcacttcacaattaggaatattgtcaggtcagccaggcgccgtgggcatgcttatagtccaagctactcacaaggctgaggcaggaggatcgcttgagcctgggagtttgaggctgcagtgagctccagcctgggtgaaagagaagaccctatctcaaaaaataaaaaattttaaaaacctgtcaagttagatgttaaagaggacatgtaaaataaaatctccctaacatgtttatgaaatagctgcaaaaggctgagcgtggtggctcacgtctgaaatcccagcactttgtgaagccgaggtgggtggatcacctgaggtcaagagttagagaccagcctggccaagatggtgaaacctcctctctactaaaaatacaaaaattagccaggcgtggtggtccatgcctgtaatcctagctactcaggaggctgaggcaggagaatcacttgaacctgggaggcggaggttgtagtgagccaagattgcgccattgctctccagcctggggagcaaatgcaaaactccatttc

SEQ ID NO: 768 - DNA, 384802 bp, Homo sapiens
gcggcggcggccgcggtggcagcgaaggcggcggcggcggcggcagtggcagtggccgctgcagccccacactccgccgccaaactggaggagcgacggaagccagaccccaggaggtgagcgcccggccccggcagctgccgggagggtcgatggggtccctcgctccaaggcggaggcgggcgcgggcccgggggccgattccgtagggcgcgcaggcggcctcagcgcgctcctgggagggagagagaggtcaattgcgggccgggcatcccctgagctgggcgcgggcggtgtgtggaggctgcttccgcggaaaagtattttttttccttcttagggtttagaggaagagtttgggtggtctgcttctccctcactgctaagtcccctgcgcgcaactgggcgtctttacgaggactgcggggccagttctgcggcgggctgggctcgggctcagtgacacgtgtgttgctgtgagcctgggtggtcgccctgtgaccaggcacctgcttgagaggaacacatccctaaacccatcacagggggagatttggggactcttggtgctaccgaggccgcggcccccacttcactgccagctccaggacggagcatttacatctctccctggcacgccaaaggcggggggtgagtcaggcagattctctgcaagtggcacacacacatttatttgcaatggatttggctaggggaggcataggttaaactggaatttctcttggccagcgacaacggagctctccctcaggtactgggcagcatgtgagtcttggcaaagagaggtgatttcttttttcttaagtgcattttactcagccgttgccagtccgttaataagtcaccagaggaaggcaggacctgggaactacatcagcaaaccgcagcaagcaccataaagacaaaagttcttatagaacaaaaagaaaaacttgaacttgacgtgaaagatggaggaagcagttctacctctcttctatcacttttttcagcgccctgtaaaactgtttttttctatccttccttccctctcaaggccctaccttctcagcataattgatcgcagcaagctctttccaacttgacactgaagagcagcgacccctttggcttaccctccccatttcttttcctggttcgcttcagtgccctggaaagttgctcctaatgagaaatcaagaacactgggctgtactaaacgctcattgtctcaaatcctgcagcagttcctttcctaagagacactgtgttgtactgtatttctcttttttcttgtatcttgggacttggagttgtaatactacctgaattaaattaattaaagtgtacattgctcatttgggcttttttttttcattgtgatttcagtagattcgtcaatgccattagaacaatattcagtagctttttatagccaatgtgatgtcttttgaaaacgtttctgactacagctctctttcttgtgtctttcatattagcatgtaaataatttacatggtcattttagtacttagactgaagatattagtataacttcattcaaaggaagtgtgcctgtttatttttctataacttttatagctgagaaaaaacttttactttcattttaaagttaaaagtactgataggattctggtctttgtggtagatcttgaaattgaatgatttgttttaactgtatcccacactgtcaagtaagatgacagagaaactctcatatatgtagatggagacaggaaagcagtaccactacattatgagctgttgaggcagagaacatttgtaggagtgggggtgacaaggacaagatgggatattttgatagtcccagccatgttaaaaaaactgaaaactaagaaacccccaacattttggatttaagtgtacttcagaatgagggttttggtgccatttgctcttttggggtcatttctggagacttaaaaacatacattagacaccttacccaatgagattgacagaatgtactctcagtttagattaatgtatttcttttagttcacgtagtcaatattaaataattttagatgtttgaatgttagtactatgatttcagtcttctaaatgattaagagacattttggatttacaaaaatgttgtgtgaaagaaataaaggcaatcagatttagaggaataatgcgatagaaatcgggtaacctttgggacaacttccagtaggccctgatggtaatctcatttttcgctgagtgctggcaggtacagttttgaggttctgatcccttgttccgataacaagagtgatatctggccatagcttacatcttaaaggaaaagacaacacttaaagaaatgcacactagctggtgaatcatgtaaataaacaggattccttgcctgcctctgtgagcgctgtagacctcatatgaggactgctattgttagaggagaagcgtcctgagagactctgctggacttaagtgtggcgagatacatatctgtttcttggagtttctttgtgtttatttaaaataatatgaatgaaatctaagaccagagttgatagataagattgggagtggaaagaacaaactgagaagaggaaaatctaatgatgattaacatttctaagtgtttttttcttgattgctaaatgaaggaatcagaatgcatgatttgatgggacaaaggaagctataagcagaacatggatctcagttgatgctgtttccaaggacaacctgtgacttatgaaatttatgtatttttagggagtcatttagcaaaatggataaagaacatccaggaagctagtaagactttacaaaactggatcttactacttttacataatgtaggaatcttagaggaaaggaggaataaagttttatttgaggtcagctaagttgtattccaaatacattttgcctttctcccaatatataaactcttgatacgtttgggtcacaaaaatggaaaatatgctgctgttcttctgacatgaagatgatctttttatcctcagtagtgcacagctttggttatttttccagcaatagggatggagtctcctttactcagttctgtctatgtatgtttacacacacacacacacacacacacacacacacacacacacacacagacacaactcatttgtagaggtggctgatttaattttgtcggaagccatattaactactttcgtaatacttctgtggcaatggcttttattgcatttggtagtctcagcagtgcaatgacatttctaacaagacattgaaaatacaatgagagccaggtgcagtggtcccagatactctggaggctgagttgggaggatcacttaagcataggagttcgaggctgtcatgtgctctaaaattgtgcccataaaattgctattaaattgtgcctgtgaatagctactgcacctcagcctgggcaacatagggagatcctgtctgtaaaaaatgaacaagtgtataaatgctaatggctttacttgctgtggcaaaggagagataaaactttttcttccaatcttcctaatgatgccaataattttattccttaatgataatgtcttacttgatgctgaatatagacggttccagacttatgatgttccagttaaaatttttcagaattacaatggtgtgaaagcattcacattcagtaggatctatacttcgagtactggtaacaacattctgtttttcactttcagtacagtattcaattaattacatgagctatccaatagtttatttgtaaaataggttaggctttgtgttagatgattttgcctagtaggcgaatgtaaatattctgaacacatttaaggtaggttaggctaagctatgatgtttggtaggttaggtgtattagacacatttttgacttgcaatattttcaatttatgatgggcttatcaggacataacccaccgtacatttaggagcctctgtactggaaaaagatagtggtagaaacagtaatgttgaaactatgtgcctctgtagttgtttgtgtaaaccaaaacatcatcttgttcttctttcctgaaaactaagtaaatataagggattgttatgcttattgagatgaagaggaaactatgacagagaactctgtatgcttttcttaaacttaactacaaattattggtggaggtaggaataagtattttaatcttttgactggtgatacatgtttgtcgaatgactgtcaatgaatgggtgaatgtccttttagtcacagcagaagatactaaagcagataaaagtttatcctgttttaaagtgatggtttccattttctgttggtaattctgctcagtagcagtgcccacttgccgcaactttatttcagtttctgcaatccagggagtatttcatgagagaagaattttcagtttgggtgtaccagttttagctaccatcttgagagctaacttttgtttttcatgtagaatgaacatagaaagaaattaagtgaaattaggatgttaaaggaaataaataaccaccaactgatattttggagttttgtatttttactttgtggatagttgtgtggaaaaggtatactccttgacttgaatttaactcgaatttctgtattagaaaccttaagaaagttgtaaataaaactcctagtatgcttttttggggattaaaaaaatcaatatgaataaaaatacaaaatgagaaaggagtatgttatgtttaacaccgctgtaatattctatgggtgacacaactagaaaaatctcttaatatattgaagacgtcttcttatttaagaggaaattggtgatttctttttttaaagtatattcactgattaatattcttcttaatactatttgcaagtaagtaaacttgtgggatatggacttctatgttagttaattctagctttggcctggagatctgatattcactgataagatctagtaacaacttcatctatttggaactcctacatttgtcatgttccccagcaaaaaagtctctgagcaggcaaaatagagggtaaaaaagtaaatacattaaaaagaattcactttactcctaggacatccctcagagtcagtttacttttaatacccatactgttctatgattgattataaagtttttaatcccatagcaaacagtaaactacaaagtagaagacgaaaatgggctttattggcaaatacatagaaaacattgaaaagtgcctgaaaacagcgtggtagtaaaggaagaggtagacagaagtaagaactaaagcaaacacagtggttgaggactatttagatttggactcttatagcatcacttcattacacccccttctccctcccccactttctcagctcttccttattttcccctcccctcttccttctgttaagtttttattgaaatacatatggtcagaaaattgtatgtcatcataccatcagtggacatctcagcgatttacctaagtgaacatgtccatataaccagtgccaagaccaaaatatagaccattgctggcatccggaagtctcctctaactccctcttcaagtcattacttcccaccaaggtaaccactctcctaatttctgagataatggttactttcacctctcattgaactttctgtcagttaattacacggtgtgtattcttgtgtgtgacttcttttgctcaacattatgttgtgagattctttcttgttttgtgtgaagcatcagtttattctcattgctacatagtgttccactttagaagaacgccacagtacatttatccattttgttcttgatttactaattttgtttgggttgtttccagtttttggccattatgaatagtgatgctatgagcattcttacgtatgtcttttggtgaacatgtcgccctgtctgtcgcccaggctggagtgcggtggccggatctcggctcactgcaagctccgcctcccaggttcacgccattctcctgcctcagcctcccgagtagctgggactacaggtgcccgccaccacgtccggctaattttttgtatttttagtagagacagggtttcaccgtgttagccaggatggtctcgatctcctgacctcgtgatccgcccgccttggcctcccaaagtgctgagattacaggcgtgagccaccgcgcccggcccatgtgggaatttcagttgtgtgttttcccagtttaattgatgggacggttttagtagatagtgccttccttcagaattggtgctaattcacattcctaccagcattgtgtgagagtatcatctaccccacatccttacaaaaggggttttgtatgtcttttttttaaaaccattctatcggatgtatagttgtatcacagtgtagttttaatttgcatttctcagagtaccttgtctatcttttcatatgattattgtctacactttttcgtaaagtacttgttcatgttttttgctcctgaagtttttatccagtatcttttcccaagtaacgaagattttaatacttggggagttcagttcttttatttgtttagaagactcagctaaccaggcaaactcattcaccaatgcttccacctgataagtaaactcatgggataaagagattacaaacattttgaacttgtaaagatgatagtctggatcttcgaaactttatccctaaaaaataaaaaacccaaaccaaaacaatattaaataactttaatacagtactcagaaacatgcagaacttgtcctcaatgctttacataaaagtagagcatcttgtaatgttgtattgcccaatgaccaatggagatttgtatttggaaggtatgaattgaacatctagctctcttacttattagttgttttgagaatttaaaaaacatccgtgtcttttttcattattaaaataattataaaacctcattcacagaggagttatgaggaacagataaagtgatctttatgaaatcttgttcagcactgtaaatggccatacatgttagttattattattgttattgtattcttcaacattccttattcttgagttgaattatgccagcactgagaacagttcctggcatattaataaatgtttgttggctgaatgaatgaacacatttaagtatctttcttaaaccgttactctgagtgactcaagctgtgctttatatattttttttctctaggacttttactttttattgctgaagctgagttggaaccaaggttcatcaagcatcatattgaaaaattgagtctaagagccagcagtttgagatcacccatttctatatagttcatattgaatttatgcctccaagtaacacacacgacttggagaacccttgaaaatgattacactgctcttcactccatgagtgatccccaaagcttacacattgaatatttttagcttctataattagaatggccacaaatttccagatttaaaatattacagtgggttctccagtgctaatactttggaaaccatgttttgtgtaaaattgaacattcaaggatgaagaatagctgaaaactggagcttttatagtaccttttcagcttaatataaataaggtgtttcacagatatgttgattataatatgaaagcaaacaacatacaccttatatacatttgtgtaaagcaacaattcttaaccctttgataggtctgattttcagctttggcttgatgttgtgactattcaaaaagtggtttggaggcatatcatttttatttttaaattaaatagaattaaaatgtgtatgatttttgttttggggaattacatgatcttcctttaaataacagtaggtatccctttgaaaaatcaggcttgcagcagaagaaacttggatttctatatagaaatctagttagattttcttacccaaagactgatgttcttttccttttttcctgtatttgagtttttttttttttttttttttttttaaagagcttatgggggtcttgggtgtttgctgccatcatttaagtatagctgttctgtggtactcagaatactgagcatgtaacattttacttcagaataacataagtcagtctacattttataaggacgtttacatattaggtagtataccttgtgtgcttgacgcaaatgtggccaatttagggtgatttagtggaaaatggaatcatctggtatagtaaacagcttttgttttctgttacagacataatgttaggaaaattgaaataaatacaaggggtagttatggtgaaccctgttaaactactgttttaaaaacagtgaatttcagaaaaatctcatctgttctgagtgatttcattcctttgagaagttaaactggctctttttaaaacaaatgcatccaggcgtgcctggttattgctttatttaaagctggaagcaaggctcctttcggttcttacttgacacatgggatttaaaaaacaagggtatactatggatttagggaaggatacctgtttaacaaataggattatgacaattaaactatctaaactgaactccaaagggaatgggattagctcttccatttcttgtgcccttcagcatggaaatctgttggccttattgaaatattcctaatgtctctaatacaaaccaggtttttgcaccttctaccccagaaggatcaggaatgaagtcctgaaagtgatatttggtgaaatatgttttgttctgagtgagtaatcagtgggaccatcagttaggctgaaagtttcatggaatcttgagtgttgatggctgcactcctgaaactctctccttgagtactgtgtgaccacagctgcagtgagacatcacagttgaactgcttcacaaattccttcaattcctttgacctctggagactctgtccttaggaatgtgagatgagcactcacgatgttagcagcgagtagggcctcatggtagggactttgctaaagtactaattacagttgctttggaaaatggcagagcattaacgattaagcagagacacgcagctcacacatttgcactttcacaggttgagctcctttgccagggaaaagggagaaggcggataggaaatgtctcaaaagatttagataaactagattagataatttctcttgaaaaatatattaagaaatgaaataaaaacaccactccaaaagcatcaaaagaaaatatagttcaaacacttacctatttttattgccaaaaccttaggcagtgaattctgcagttgaattgatcactttattgttttctgctttgcactgccctttaattgtttcatatgtgttcatgttgtctacacagtatactttcccatggtcctcacggtggccagaaaatgcttatttaatggagggatacttagtatttttaaaatgtgtactggctgggtgcggtggctaactcctatagtcccagctacttgggaggctgaggcaggagaatcgctggaacctgggaggcagaggctgcagtgagccgagattgcaccactctactccagcctgggtgacagagcaagactctgtctccaaaaaaaaaaaaaaaaaaaaaaaaaaaaaaaaaaaaaaaatgcagacagaccagagatgccaaattatcttatccaactttatttaaactgtatttctggctgggcacggtggctcacgcatataatcccagcactttgggaggccgaggtgggcggattgtttgaggtcaggagttcaagaccaatctgaacaacatggcgaaaccccatctctactaaaaatacaaaaattacccaggcatggtggtgggcacctgtaatcccagctacttgggaggctaagacaggagaattgcttgaacctggtaggtgggggttgcagtgaggtgaggtcgcaccactgcactccagcctgggcgacagagcgagattccgtctcaaaaaaacaaaaacaaaactgtatttcttctggagatattcctccaatgcagtagctgtgatcattgctattaggctttttacatactttttgtgaaattcattgtaatgaagtttggaacccatatctttggggatgagtctttgttattatggtttgtgatatgttatagtttcttggaaaaattaattaacttattttgatatgactgtatttgatctgttctttgagttggataaattttacttattgattatttgagattaaaaatgaattgttagcagttttataaataactttttgtttttaaacacaggctcactagaagttgcaaaaatacagtgcagagagtttttctgtatgctttacttagcttcccccaatgaacaccactttaaagatgcctaaaaaggcctttacctaatgggtgcagcacaccaacatggcacatgtatacatatgtaacaaacctgcatgttgtgcacatgtaccctagaacttaaagtataataataaaaaaaagatttataaggaatagcaatttttatacttgctctgaagaaatatgtatttattaatcactgattatatgtataaccacagattataaaaaatagaattagagacacctactaactctctattttggggggttgtgggtttccgttggaaaaggtgctcatgtggcaggcaagaaggaagagtcattcattcacttatttattcatatctctgtgaatttggtgtttgcctcattcaaatcatttaaaaaatatttatcatattgattacattgaactaagagtttgaagtccaaatgttgttcctataaaatctttggaaaatagaatgcaaataaaagtgaatgagagtagaacttctttatggtacaggtattagggcagcatgataacactggattttatgtaaaggtgagagaatatcattgttctatacatctctgttaggtgcatgtcattaccttacaatatatgtgaaagcacaatatattgagacgttttagaacagatgtttcatttattacatatgcataatatttccagtgaaatctcagtgtttcactactccttaatatattgataaatattacacttgaacatgcatttgagttcaattatctcttaataggaatatttaagtgctatatttctatgtttgtccatgtatctgaactttatgcagtcttgtctagaatattcctttgagggtttggtcttgcacctcagggcagatgtaactgggaagggtctagagaaacacgctgcatatcatgagaatggaggagtttctttaagagaacacacagaaagttatttgaatgcttagggtcttgaacaatgaagtgtaaagtctgaaaggagacctcaccaaagcctgtaatggtcatgaacacttaccccaaatccaagaatatcagaactaggagcaccacatataagagagaaataggctgggtgcctcatgcctgtaatccttgtgctttaggaggctgaggcaggaggattgcttgaggccaggagtttgagaccagcctgggcagcatagtgagaccctgtctctacaaaataaaaaataataaaaaaatacataactgagagaagtaggtttagcttaaatttttaaaaagtttaagtttatacagtgggtatttatgtgagcagatgtttttaccacaagaggagaaactggatactctaacaggagaaggtccagagcaaatcactgggtggattaagtatttatacaatttaaaagagaagatggacatttggtaaatagacctaatcttttgggtggttattctctctttactcaagactttacccaggattatcctcttttcacagaactttcttcaagtcacttatcattttgtagaataatttcctgttctttgatgtcgtcaggtgtcactgaaagttggtctagaggattgtgggtctgaccgcacatgacagttcctataaagtttactggcctcagcatgtcttatctcagctcttgaccttgactggaaggcactagtgtaaatgcattgttacatttgaggttataaaataagcacttagacttccttatacaatttctatgaaacaagtccacaccttgctactgataacatgaaattggatgttatttctgaattgaaaccaacatttttggtttggggtttatctggtataatctcactactctgaaaaagtttacttttccaaataaatgcaatatattttattttgggtgagtttaaaaatcatcatcttggatagcttttttaaatgtaatactgtgtatgcaaattaaagagcctggaaagtctggtgccatgtattcctgtttggcctacagcttttagcttgtgtgatagatggattctgccacatgggcttgaacaacacagtgtcctttttttatttttatttttattttttgagacggagtcttgctttgttgcccaggctggagtgcagtggcgcaatctcggctcactgcaacctccaacctcctaggttcaggtagttctcctgcttcagcctcctgagtagctgggactacaggagcgcaccaccatgcctggctatgttttgaatttttagtagagatggagtttcaccatgttggccaggctggtctcgaacccctgacctcaggtgatccacctgcctcagcttcccaaagtgctgggattacaggcgtgaaccactgtgtccagcccacgagtcttttatataaaaaccagaacagcaggaaaaagcaggttagagcatgtggcccaggctgctacttgagttgacagctgatggaataaattcttagttctgtagagaaagtgaggatttagtccttaggtgattgtctggggatgtgggatctgacagaacccctatggcttggggagcaggggtgggatgatgtgaaagccttagtaggtactatgcagggtctgtggaatcaaggaagaggaaatcatattttgaggaggctgattgtgagaaactgtgaacctgtctgcttaaattacaagagtggcctgtttatctgctgtcaatagagtatgaagtagtcattttaattgaattttctgataattgaagcttattaattgtctaaaattatcttaagatattttctgatgtacatcattttaaaatgagttgcacacatttctattctgtttcaacatattcaatataattttcgctcttgttcatctgttggtattcattatataattcagacgtggtctcaggtctggagacatgtgaagttattgctcctacactgagtgtttccatgtcattatgccttaatccttatttagacacagctatgacaccctctttacaacataaaggataagcaaaaggatgtataaatgtatcctgggctggaaagtggcattattgactggccattggccatcagcaaaggggcctgagtggaaggatatgaaaggatgggtgtaatgtagatgacgggttgatgggtgcagcaaaccaccatggcaggtgtatacctatctaacaaacctgcaggttctacacatgtgtcccagaacttaaagtatagttaaaaaaaaaaaaggatgagtggtgagcacagctgacacaccccacgaatatctggggggctttgagaaggttgctgagatccagtaatcatgtggcaagtttcagttatttttattgagacctcttggctcaataggctgttgaggtcgttggaaactcccatcaaagttgttttccaaatcctccatgactgtcagggtttccctgtgcgagttaagagcatgagctctggagccagagagcccaggcttgaatcctgtctctaccattgtcttaggctgagttccctgtgaaacagtttgtgagattgtgcaagaagtttactgggacttgtactgagggacactacctgttggggagttaaggaagttggactgggaagagggaggagctgaagagcaagacagtaacagaggcctcagctgaacccatcaggagctctggagctggggagagagatcctttagagttgcccccagataaggaagctaggcctctttatcccacaacaactggtcatgatatatgggctgcctctggagaggggtgtgaccttgggtcagacggctctctttggctaaggtaatttctagaacaaggttgagctgagcgtcatcaatgaacactccaccagctggggaagcacctctgttctgcaggggagatctgggctgcacagcacagcaccaaagacttcgtgccttatgacgggggactctgtgcttccaagttctttatcccaaccttctttaattcctagagtttaagtaagttaatgaatgtgaaatgcctagaaaaatgcatagcacatagtcagtatggtttaggtgttcgttattatgatcatacctgactttatcagccctacctctattatagtgtggttcttctaatatgctgtgagtctgaaagctgttaatactctccttatttttttaaattttctttgcaagaggaaaacatctgacaatattttagtaagaaatgatttaacatataatgtgtttttgtaccatttgtgtttttaatttttaccagaagaaagatgcaaaagaagtgattactgatgatgacatttgaaggatttggacatatggtggataaaagttttaggagtatgtgtgtattagttgttggcctccctcaaagtaacttagataagcaatctctgagttaacagagagttcactgctgttgagttggagactggtgtgataagagcagttcataaccaggggatagtgtccagctgagaagctcctcgaagtgttggtcttcaactatcccatcactgtaggcctagatataaacattagaacatataaccaatacatatagcattgacagttaaattgctttatttcttaaacatttcagaatcattcatttccgtatttaaattccataaatatagagcaaatcacctggaatgttttagaaatttggttttgattcaaagtaatgttctcatggagatgcagtctctgccaattcatttctcattcactttaggacatggctaattcccttggacagtttttatctccttcatattcaaatgggtggaaaacattttatctgaaatgactcacccttcccccacctcctcaaatatggcaactatgttgtattgtttatttttaagggactatctaattgcaccgttaacattaaagcagagagttaaaaatgtatgccacaaaacactcttttaaaatatcaagtgtgaacatgtcttctgtttgtaccagtaatccattatttgtataccctaataaagccagcggagtggaggaggaaataatacaacaccttctttgaaaattttttttaaaaaagagggcttccttgaatccattttcctccccagttttaatttaaattgctcgtacttattctccatttcttttaaagaaatgagattgttagaaatgaaccatggaaagtaatttatctacatatttattatatgatgatctgtagaaaatgaggattacatggaatacacagtaatcatcaagctgtcaacaagaaattttgttttagcttaactttcttagacattaaccttgtttctgagttgagcaatctgttgtgggttctatgcagaattccatggttacttttgttatgtgagccaagaacctaatggaaatcttctcacttcagcaaccagctaacgttttttttcctattgagactaagaatatataacacatttaagattttagttccacattttggcggagggtggtgtttgggaagagtgaatatggataaaagatttgaggtagactactagatgtgtaaaaatgtattaatgtttatatatgatgagtggtaacaatgtattgcataacaagtcctttctccttttagaaagatgacttttaaaactgtgtatttaggggattaaaatacataaaccctctttttagagaaacattgttgagcttgatttaatgggaaacaactctatatccaagaagataatgctagtgtagcttttaattctcaaaaacctgaaattatgacattggtatagatgatctttcactgcgtaagagatagtgaagtaaaaataatattttggacaaaattatgtattgtgtccaaaatgggtgtaggtgaaatttctactcttgtatatttaatccgaagccagccacagttactgtgtgatgactttgcagagggtcctgctcatgactcccaatttaaaaaccacttaatgccctcttttttgttagcatgcatgtaggtaggtttttatgtggattttagttataccttggcgaaaaacatgcatttctcaatcttgggccattgacctaagttttttaaatgaataaatgcaaaccagaacatattgtaagaaggaaaatctgttgatccaaaacacttgtttatttaaatagaatggcttattactttcatttagagtataaaggttaatcaagtcttgggattgttcatctaaatatgtaaatgtaatgcggtcagggacacctgaataaatgtttgcttaaatgataactagttagtagaagtatattaaactagattttaatcactcacaaagttttacatgtgacatgtttagtaaactcactgtttattatgtaatttaagtaaaaggcagaagaggaaagatacctaataagcgaaacactgtaaattccagaaaagccatgttattagaatttatattttctctgaaaaccaagtagtttttcacccacaggtcactcaaaggtttatcaaaaggagaggaagattccatgcggtgttggctatttgatctaatggtctaaatgaaatggaaaaagaaaacatgtccttatgctaatggttcagtttccaacaataaacctggtgggttcactttaagtgtggtttcctgaaaattgatgatgatttttagcacttagcttcttatcttcaaagcactttccaaatgttaaataattaattgccacaacccccatgtgggcgtagaatagcaagcatgtctttctgtttaccaggaagccattatgacagagtctggaaatgttgatttttatttttagaggtgtctttgctttccaaggtgaccagcattttaaatgatgtcctggtttccaatcacagggtcatgggaaaagttaccaaggatgttgagtacttgaaaactttttattcttcttgtttccatacaggtttcacttttcatcttacttttgcctgttcatcattttgcaatactattttttaaaatggaatattaaatattagcaagtttagtctttgctattagtatagtctctttgtaactagtaaatacagcatgcagaaaacctggtggaactaggagggataaagataactttaagtggaaaaaaaatcacatttcaaaaacaactttaatatattaaagaaatgaatcattttaaacaatagtttttctagtctaacttaaccttggagcctgaggaataatgaatatagaccatgtatatgtctaacagtgtatagttgcactgtatgacatatattgaggatgaacttatataaaacaactagagaacaagaaagacaatgagagaggctaatgtagacaaaataaatatggaataagatggctaacactggggttaacacgtacatcttaacactggatttaacgcatacatcctgaggagactgaggtcatgggtgatggtgtgacaggacctttaggaaggaggtgggttagaatttacaaggtaggtggtgactgtcctagcagacaatacctacattagccagactaattcccagcttgtttgtgttgccagcgtcagaatatctactgattagctctctggagagatgcaggatggagtcactgtggcagatgcagaaggctccccatccctcagcttctcaacctttgaaatagaaaagagccaggaccttactttgagagcagtcaatccctttatgctttgagaaacccaccagataacaaagagaatgctatggtgattatttctgatgaatgttgtttctttgcatacgattaacatctttaaaggcagagcagagttagatttcttccatgtcattttaaggaggtaaggcccccccatcccccaaatcagaagtgtcagctaaacacttgtctattgaatgcaggtatatcttcttcatcatgaagtttgagacccacagctgggcttcagagaaacccctcgatattgttgtatacagaatttgtatatatatttatttttttctggagaagtatgtccagcatatttatgacattactgaaactggggcatacacacaaatatttaatatttaatactgactaggttcccttatggaccacaaaacaaaaggtcagtttctagctattgactcctccaaaatttgaatgaaaataaaatgagagcctgtcagctgcaagacatcacctccaaaaaatctaatgtttttctcttatcagaaagatcagaaagtgcaatgatgcagtcaaaaccagtgaacatggctatttaactacagtacattaaatttggaaaggtaatgatcaagattattttatctaccatcagtcatgggactttcttactatcagatctagagagggtatgcccataaggataaggcaactttaattgtgcatttgtaatttagctcacattcaaacatgagtgctttgatagcctttttgtgggaaattgctcattgactatgtcgtagaacgcatttgggaagtaggataattctttgcctctctatagttctttccataagcaaagtagttattttcctgtaagtttgtatactaatttaatctttgttaataagaccacattttctgtgaaattttgcaaataagatcatgattataactcattaggggaaggctgatatttaaaggagtattggaatataagagaatcattaaatatggaaaacaagaccaaaagactagggtattttaattgaagttcattgttggtctttgaggtgtgagtgttcaataatctcatgaaactatagccacatttaaattatatattcatatatccattttatttttaggttacaattcacagttttcaacagatttccaaaaggctcatggccccccaaaatgttaagaattattggcttataatgtcagaattttataagtgcttatctaggaagaagccttccataattttgagaattttgctcaacttcagtaatttgaaaacaggtcattgataaagaataaaatagtacaatacagtggagttcaaaactgtttagttctgagtataatgctttatgaatatatattagacttgacaaatgtgtaagaagataagcaagaaagatcaaactgttaactccgaattataactgagggcctggggctgaatatatgggttgaaatctgtcaataatctgtgaatctcattaaaaccagtagttggaaccatttcactgatgaaattcacattcattttgattattattattattattattattattttagaaggagaggtttccgaccctagtgattggtttggggtttcatttcctctactataatcatctactgcaagcgaatcatgcagtggttaagtattcagcctctggaatcagcttggacgatcatattactttgctactatgactgtggtcttggggaattcacttgacatccatgtgctcctcttctgtaaaataagcataatggtactagtaatcttataaggttgtaatggaaaatcaaatactgtagtgtatattgagaacagtaccacctgtctcaactgaataattttaattttgtcatcatttctgaagtgatgcctgctcataagatagataagatactggcagctgaaaggacaataagaagaaatgaggtgttggctctattccaaacactatggtcccttgaataaatgagaattgacgatttgttttattgacactagtctgaagtctcctggaaatgtttcatctgctttagtatgtctagacagatggtcttcctgcatagaatatttctatgtttattaattcagaattagaacaatttaaaaatctgtaagcatgtgtgaggataaatttatagcatgtgcttccatatccttaaagcaaagtatatctataggtgcaaattactgttgatcttaacaactatgatttcccaacatttggtgggtatttaactttcacttgtttacaaaaaaactaaatgaagtcacttgactatgaaatacactttaaaatattgaaatcagatagccttagatgataatttttctgcagtggtaaaggaagtattggaagtgatgcaaaatttgctacttcacattctccatcaattacttcatggtttttcaagttaatttgtatttctaagaactgcatgaaggcttattttctttgtgtagaaaaatattaatgcttgaattctgttttttcctctttattttcatttgagtttaggaaatttttggaaggctttcctcctttttcttcggggagacaggggctcattccattgcccaggttggagtgcagtagtgcaatcatagctcactgcagtctgcacgtcttaggctcacgtgatcctcccacctcagcctcctgagtagctgggactataggcacgtgctaccttgcccagctaattttagtttttatagagacagggtcttgcttgttgcccaggctggtctcaaacttctgggctcaagccatccctctgccttggcctcccaaagtgctgggattacagatctgagccactgtgcctggctgctctcctcctttgacaaattataataatataacaatgttggctgggcgtggtggctcatgcctataatcccagcactttgggaggccgaggcaggcggatcacgaggtcaggagatggagaccatcctggctaacatggtgaaaccccatctctactaaaaatacaaaaaaatttgccgggtgtggtggcgggcacctgtagtcccagctactcaggaggctgaggcaggagaatggtgtgaacccgggaggcggagcttgcagtgagctgagatcgcaccactgcactccagcctgggcgacagggtgagactccgtctcaaaaaaaaaaaaaatatatatatatataataaaacaatgttactattacaggtatccagatatattattggctaatcattatctgtaaaatgaaaaaataattggaaataaaatgtggtattacacaatttatcacattatattaaaaggggcctacattagaatgtgtagaagcaagcctttttttttggtattaaaatctcataatctcatttaatgatttattaattatggttttctttcccattacggccttttcttttattgttgtcatctggactcttctattttaaatcacctttctttttatgattgtatgaaaaacaagttaacctagttaagttgggttctaagatgcctgaatcagtgtcccacaccatttataccatctcttgaggacattagatgatattcacgtgaccctcacttgagtgtaattcttgagccaggaccaaaggtttgacatgagatgaatatttctcagtttttttttccttgagtttccagacttgaaattggctagcaatcagctggaatatttggttatagagacaaatttggttacgctagaaacctgatctttagaatggctttatgctctttatgcaatgctgaaagtcttcagaaagtttgtgtcaaattttcttgcctttgtagtttattctgcatgatcagaataagtgtggcataagttactttatatgacaagggcacatattttttccccccatgctcaatataatatgcaaatcaaaaggaccctcatactatctgtgctattggctacagtgtattatgtctaacttttgaaatgaacagtggcatttttatttcatagtcatctattgagcactctgttaggatcttggaaaaaagaagcagcagggcacattcctccctaatgtgtaacagtctactgggggagacagggcagacacatttagaaacagaattctacaaggatgttgcaagaacagggtcaagtgaagggtgtctgaggttcacaggtgctgaggcttgaaacctttcttttcttcttcttttgaatacaacacttagatcacattgttgcagctaataaagatgtatcataaaatatgagtaccagtagctacctgtaatgcattttggagattttcattttattgtatctttcttcagaaaattatgagcatttcaatctgttagtactctgcagttgcatatcaattggactcaaattgctcaatctctgattttcagacctatttatttttttccttcctgattattgtgagaaatacttcctgagtattgtgagaaatacctttaaaacctaggttttaaaggtagctgactttgctattgtggtgagttatgcttaaaaattggaaaaataaattatgatgtatttttggattaactattatttacagttttcaggagattttagcactgtattttatttcatcattattatttttatttggttgtatgttatttggagggactgttccagtgctttttgtggtctaaccatgaaagtctctgagaattgaacatttatacacttttccggagaacgctgtgaccatgtttatctcttttttccttttgcttttcaccttagttgcctgtcttttgaagcctgccatgctggcaatgatatcacatatttctggtgctttttgtaactaccagtgtggacaccaatggggtgcccatctgagtagccctgggtgtcgccctgagctcacctgcatgttggcctgagcactgctggtattgtagggatagtcaatgattgcttcctttgggcaagcaggagctgcaaccccctgtgtaattttctaggcagtaagcaagggtgtgtttaccattatccttcttggctgtttaatagccattatctaatttaaggagaaatcacagcatctatgcaatctgtcaaaaaacatgatgacttaaacatacttaatgtatttctagaaccaaagtaacagttgccagaaatgttgaagaaagtaaatgtcttctctgagaaactttagtttgtgggcaatgcattgtatgtgttaaaatgcataatctttggtaatttttcaggaaacattttcttatcggttatttctcacaaaataacatgttatttgtgatttctctttctccatctgtccttccattccccacacttaccccaaggaaaatcttagggaaattaacacaactaaggagaaggctttcttcttgttactgggaacactgtgtaaacaaaatgatcagaagaatctcttttaaatcttgaaaaagtatatttgttggaggttgaagctatgttgttatgtttatatatttttctacctcagtagtctgtaatctcctgaatgaagtgtctgtatcttattcattttttatgtcatcagtctctagcatggactgatgcagagtaggtactcaataagaagttgtccaggagagctgaactggaggcatgcagctgcagttataaagatgaaaagtgatagagaaaaaatatttgctactcagaatttccaaagaattgtctgaaaaatgtgaaaagacttcgagccaaaatatgacaaagaaaactcgcattcagaatgtttttctttgtaatttgtcttggcaacatttattcctttgcacagatccatgtggttgttagattgctttcaaataatatcgttgtatgacagggtgactgcatatacttttaccacaaaataccttcacaaaacagtttatctttttataattaccttttgtcttttcctttacttactcctacagattttaggcttttggcagattcagaaaagatttatcttttatttgcttttaacaatataaagacatagtgattctcctatgattctgtattctgtaaatttaggtctgtcatcaccatactttatttaacatagagaattttttatatattacctgtgaaactccaaataatttgcaaaattaagatatcaaaatggtatatgatagctcacaccatgaggttgtttttaccaggaggtagaaggatactttgggtctgtaacacaaactactaacaataaatttctgtccatcctaattgcgaatataccagtttttaggagtgacctcaatgttgctgcactctgaagttttaaaaatgtgggtatgtttaacagctccccaatgaatctgagcaaaaacctgaagtgttggagctctgccctaatttggtggacagatttttcacaaatctttattgctaagaagatggaacatttgacaatttaaagtcatgtcccccataagttgagagtaaacacattagtaatagtgtcacttgaatttatctgttttttttttttttttttttgtgtgtgaacagcttataatgctttatggagcttatcaaagccacatggtgatgactgtcaggcctggagttgtgcaaaaatgaactttggctcttgcagcgaaggaaaattagacgctaaaaaccagggattttttttagaattacctaagacagggtttgtaagatttacaaccaaattcacggatgtgatgattgcagtgctccctcaccaaggaagccagccaactgtgaggatgtctcactggttgtgtgtgaagacaactaagatgccatctaagaaaatctaaccttccagccttggcttgtacaagtgtgtctgccctcaaagagtcattccagctttctgtcttctgtctgaaagaataatttaggtctaattttaaaattgtctaattttcccctaaaattttgagttctttatctctattgttactattctggggtttggaaccctctggctttttctctaatgggctgttcactgagcttaggtttctcacttggttagattcggggttagttttaatgtagtcaccatcctgtgttgaatcctcaggatcaggaatggatctaggcagaattatgtctgactgggagagtagccaggaagaggcccaggcctctggagctgggcagaaggtgggggttgcccttgctgggagcagagggtgaataccagtgctgacctgctgtcagaggggctcaccagaaatgagaaaaaccagatggtcactaagaccagagttggaatccacaggacagaggcacaatggggttggagaaccatgggatatgaaagtgtgaggggaaggttgagactagatgaatgagatgaggtgggccatattccacaatggcaatgacatttcctgtgtgcacgcgtttgtgtgtgtgcacgtgtgtgtgtgaatagggtagcaggtttagttttgggtaggccaggtcacattaaataaactggcatgggataggtactagggagctgagcagagtgattaccatgaggctaaagctcctctgttgctgggggaaagtgtccaaaggtgagagaagtaaatacagtcattccttgcataacgatgttttggtcaatgatgggccacatatatgacagcagtcccataaatttatattattgtatttttactgtacattttctatgtttagatacacaagtacttactattgtattataattgcctacagtattcagtacagtcatgtgctgtatgggtttgtagattaggagcaataggttataccacatagcctaggtgtgtaagaggctgtaccatctaggtttgtgtgagaacctctctgatgttcacacaatgacaaaattgacaaacgatgcatttcttggaatgtttcctgtcatttaccaatgcatgactgcataagacctgatgataactcagaattctgtattttcctgcatacagggtgttgctgatttgcatctgtttgtcccttcctttattgtcattactagaaataatgctggattttacctcataaagtattggctcatgagtgccactcttgacatgttacaaggagctggtaaagcagacatagagaagcctctgttcttatttttgagactaaaacacaagaaagctctgctttcaggctggtgggcttgaaagcaggggactcttttgtcaccacacaatttgatcttactggagtactgagttttcatggcatactaattgctctttattaagagtcatttctgtggctgtcattatgattgtgcaccttgatgtatattgatagagtaaaagatgaaaaggtgagaagaaaatctccctgatatggactgaatgtctgtatccaccctgacccccacccagagtcataagttgaagccctaatttccagtacgatgatatttggaagtaagacctttgggaggtaattaggttatgagggtggagccctcatcaatgggattagtgcccctgtaagaagagacatgcgagagatgatctctttttggccatgggaggacatggtaagaaggtggccttctgcaagccagaaaggaaggtctcaccaggaacggaatcagctagcacctggatcttggacgtccaagtcttcagaattgtgagaaataaatgtctgttctttaagccacccagtctatgatgttgtgttatagcagcctgagctgacaagacactccctgttctctacaccctacgtaggctgctcccttgcaatatttttatgcttgttcagttggccacttagcatcccaatcatttttcttgacatggcccccaggtacccagatgtactggggttttgtgtggagaactgaactgtgcacaggctacacctttggcatgaactgatcctgtaccgaggggtatagaagtgctcccagctgtggcctcctaacttggtttacacagccccgtatacaacacttcagaagtgtgtcatcctcagcctaggatgacgctggctaatggccctgtagggagggaagaggtttgaaagggaatgataattaaagcaacttcagttacattgtggattttctaggatttccaggtacatgttagcatttcctgatcaagaaagttggtgatctcaattctgttttccataaacgcatcatcatggcaaaggctgatggggcagagagacaggatatatgacccttgtatataacccagaagtcagggatgtggtcccgccaccactcgtaccctatcctacgtacataaaactgtcccatatctttactcttgcgggcttttgattttgttttgttgagttctgtgtttattttttgctgtgtacttaaattgattcaataaggcacatgatctgagcaaaaaaagaaagttggtgaaataatagatttatttactaatgtttctgaatctttttcatgtcacagagtgctcagtaaataataatatttgcatggtacactgggtaaacagtctggacatcttttggcctggggcttgggctctgcctggccctgcctggcagctcccaggagtgaggggcatctccacccacttgaaacttactccaaccctggtttagaaccatgaggattcacagttgatgcagtagtagctttatgcattatgcagctttatgcattctatactggcaacttgggttatgattttgcttttgctgtgatttcctagtgtgcttaggactttttgtctgaattatctgatctctaacccagagtcaatatgttacttatcttattagcaactaggcatgctgagagaataaataaattgtgtgtaactctttgagtatcttcaaagtaataccctatgctattacaacggtatcacaaatgttggatcacaaatgtcatttagtccatccttctgtcctctcctcaatcttgttgatagtacagggtagactaaaacatcacagctgggtttctttatttcccctgaatttattaattcgctcctgactgcttttttcttgttttgttttactaagaactttgtgttctggtcctgtccaaggtgcagatggttatgctttcaaaacaccttattgtcataatagcactcatttcaaataatactctactctcagtttcaccatttcaagcactattcatttgattcttgaggagaaggtgatgctcttccactgatcctccaggaagggtctgatcctccaggaaggctccatccacctcgttcctttcccaggttcataaggagggtggcagtgtcaaatgaaccctgtgccaggcactttcacattcagtaaggagagcatgggttttagagtcagacagatctaagtgtgaatttccatctcttcccttttagactctgtaacctcaggacattaactttatgattatgggactgtgtttcatcctatgtaaagtggagctagtggtaactactgggtgtgtgctgccgtgatgatcacaagtgaaccgtcccaaaggggctagcaaacagtgggtgctcaacaaacgatacatataattatcattattgataattctgtaatgcattgtacagagtcagttgttttaccgaacaaaataaattattattgcttgtctaccaactttgtcatttctatttttttttttttttttttgagatggagtcttgctctgtcgcccaggctggagtgcagtggcgtgatcttggctaattgcatcttccgcccccaccccggattcaagcaattctcctgtctcagcctcccaagaagctgggattacaggcgtgcaccaccaggcctggctaacttttgtatttttagtagagacggggtttcaccatgttggccatgctggtctcgaactcctggcctcaagtgatccacccaccttggccccccaatgtgctgggattacaggcgtgagccacaactcccagctatcatttctatttaagaaaccattcatttcagaaaattagttcttaccaaagatgtgttaactgaaataacatttttttcttgctttcattcctctgtcacttctatttttaatgtttcttttattctgatttttaaaaattggcatttggggtcatttttaagttttattcttgtcaaaaacattacacaaacaggtctgtatttcccagggtgaccacctttcaaaaatgcccagctggcccatttccatgcctcagccatgtgcccagttagtcctctgactattatcaacaagttgagaaatttgacctctgatatatcaagaggcacatgcttgatgatttctttccttgattccctgcaaggttcaaaagagggaagctcctcttatcctttatttttggcttccaccttggaactaataagcttagaaaagactttggaaggctatctggttatccctcctgctccatgctgaggagggagcatggcatggagcattggagtcagagctgggtttgaattctctctccgccagttgctagtaatgtgaccgtcataaacttgtgccaggtggcagcaatttgacctttatgaacttgtgcctgtctgggagaaattaaggacttgcggcatgacaatactagctacgtgccttgtctacctgctctatgctaagtatctaccacgcagggtgcttttgtgtctgttatcccatagcttctccacaactgaacaatgtgggtattactaagtccatttttcagatgagaaaatggaggcttagagagttggtaacttgaattacattcactttataaaaattctttactaattttgttttaaagaaactgtgtgagtgggacaagatgtggagaataagaattgagcaagaaataccactttagatttgctttgacattaaagtttttttttaaagcaatttaatccttactgagactgaataatatgtttctactaatgaatgggctgtcagctctaatgataaaacagtgcaaatcagcagtataatggagcaataaatgatttgggtactaacaaaatggcagttatgggctgggtgtggtggctcacgcctgtaatcccagcactttgggaggctgaggtgggcgatcctgaggtcaggagtttgtgaccagcgtggccaacatggtgaaaccccgtttctacaaatacaaaatattagctgggtgtggtggtgtgtgcctgtaatcccagctatttgggaggctgagacaggagaattgcttgaacctgggaggtggagattgtcatgagctgagatcgtgtcactgcactccagcctgggtgacagagtgagactccatctcaaaaaacaaaaacaaaaacaaaccaccaacaacgaaatggcatttatgtagcttagagagtagtttttatctgtagatgcttattatatggttgcttttcaaagaccattgtaaacaaaaatgattctatgactgtaacagaaataggaaactctcagctggtcatcacttctatttggtataagagtggcatcatatgtacttagctggcatttcctgattgactgttggtttttatagaactggaagcagaggcaggaagacttacaaaacagactctgaggtcttcatcaaggctggaatgtggtagtgacagtctgacatgcactgcttttggcttttcttcctttttggctttggctgaagctagtgagctggggggactgtgaaagttaaaacaaatggagagtgtagggaaagtgatctttgctttttctaagactcttcttggcaatgggacttttcttctgatatttacaagaagaaataattctttcttttttaatagtggcatgtaaagtgatccaagtaggtaatagttcataagcaagtcccaaatctccagaagggagatgtcatgatactgaacagctctttaagaagtgagtgatgttttactttggtcttcagaggtctgtgtttatccaaataatggagttttgagataatgagaaaagcaaatgcaaaaagttaccttagacaacatgcgtatgtaatttcttcttagagttggtttgtctcaactggttatggttaattttatttgtgattatctattagaggtaacactggtatttatgctctaatttcagtcacttgtttgatgacctttctaaacaaatacgtgtgctgcttccaacttaattttggaatgccatcactttatatttattatttagttgtttgaaactcaaaatgtatttcactgtagaaagcaatattagaatggtgcttagtgttccagacccattcaaatccgtacaaatctatttcacccataatatacctaaaacagtactattagcactataatattattagtaattttgatactgtgagctaataatctatatgggttgtatcacttagtagctgtgtgaacttgacaacttgcttgcatctttaaatctcagttttatcatctgtaaaagggggatgataatagtagcagctatttcattgacgagtagtcaagcttaaataattcatataaagcacttattatattaaattttattattatttctataatttggccacattttcagaaaattgaactttgtgagttggccttggaacctaagcaacaaatgtaatattacttccttgggaaaaataggtatcctgtgtttggcaagaagggactatgctgtcactgggaacatccttcttcttcttttcccttgtatcccatcaatgtctagtaatacaagggactgtattagtttttggagagtttttattcttctaggatcacagggaagctcacttttctgcagaaacatcacaagagcctctaagtgttcaagtgaaaggaagagtagcacgtctctcactttaagttaaaagctagaaatgattaagcttagtgaggaaggcatctcaaaagccaagataggtcaagagttaggcctcttgccgcaatcgttagttaagttgtgaatgcaaaggaaaagtgcttgaagaaaattagaagtgctactccagtgaatacaccaatgacaagaaagtgaaaacaacccttaagatttatgctaaatctcctctgcctatgctctgaagatggaacagcacagcctagataacagtacatctgtttatagcatgatttactgaatattttaagctcaccgttgagacctactttcaaaattttgctgcttattgacaaagtgcctggttacccaaaagctctgataaagaggtacaaggagatgaatggtggtttttatgtgtgctaaaataactttcattctgcagctcatggatcaaggagtaatttcgactttcaagtcttatatttaaaaacacattttgtaaggcaatagctgtcataaatagtgatttctctgatgggtctgggcaaagtaaattgaaaaccttctgaaaaggatttaccattctagatgccattaaaaacatttatgattcatgggaggatgccaaaatatctacagaaacagaagtttaagaggaagttgattctaatccttatgggtgattttgattcattacttcgatggagaaagtaactgcagaagtgatggacatagcaagagaactagaattagaagtggagcctgaagaagtgactgaattgttacaacctcatgacaaacttgaatggatggggagtcacttctcatggatgagcaaagaaagtgatttcttgagatcgaatctgctcctggtgaagatgctgtgaacattgttgacatgacaacaaaggattgggattcagaatattacataaacctagtcgataaagtagcagcacggtttgagaggattgactccaattttggaaaaagttctactgtgggtaaaatgctgttcaacagcaatgcatgcaacaaagaaatactttgtgaaaggaagaatcaattgatgaggcaaactttattgtccatcagagttgaggcaagaccttccactagcaaaaaattacaacttggtgaaagctctggtgattgttagcattttttagcaatacagaattttaaaattaaggtatgtgcattttttagacataatgctattgcacacaatagacaacagtgtagtataaacgtaacttttatatgcattgggaaacaaaaatttcatgtgactcgctttattgtgatatttgttttattgtggtggagtggaaccgaacctgcaacatctctgacatatgcctctaaagacattaaaaatatatataacctcaccaccattatcatacctaatacaattaataataattccttagtaccgtctaatacccaattaatatccaagctttcttgattgtctcaaaatagttttttaaacagttgatttgtttgaattagcatctcaacccatgtgtcacattagatagttatgtcttatgggtgtcttttttctctcagagttaaggagagtgtttttattttattttatttattttttttaacttttattttaggttttgggggtacatgtgaaggtttgttacataggtaaacgcatgtcatgggagtttgttgcacgtattatttcatcacccatgtattaagcccagtacccaatagttgtcttttctgctcctctccctccttccacactccccgctaaagtagaccccagtgtctgttatttccttctttgtgttcataagttcttgtcatttagctcccacttacaagtgagaacatgcagtatttggttttctgttcctgggttagtttgctgaggataatagcctccagctgcatccatgttcctgcaaaatacatgatcttgttctttttcatggctgcatagcattccatggtatattggtaccaccctttctttatccagtgtcattaacgggcatttaggttgattccatgtctttgctattgtgaatagtgctgcagtgaacattcatgtgcatacgtctttatggtagaatgatttatattcctctgggtatataccgagtaatggaattgctgggttgaatggtagatagttctgcttttaactctttgaggatcaccttactgctttccactgtgaaggacagtgtttttaaattgggatgtaacgtccttccacaatgtggaccactcctgtttgtacaaacaagtggctagaaccaaacacgggatgtcattcttatggcaaaggatgacaagctcagggcattttcccccaaagtgcagtcagtgtaaccatggaatcagaaaactcatagtttaaaacaactttaaatgtattccttttttatttaaggtatcaatttgaatcgtgggtgttaaaaaaaaacaccaacaataagctctatgctattctcatgatatccacatattaatcatctgctttggcatcttctagcactacgtgttgccatccctggggcagatttaggtaggcgaggtttcaagtggcaacaacttgagtcatgaactttggagctagtttggcagaagttgataaagattatattaacaagttaatgcagattggcctttgtcatgagcactgaaacattgctcagcaccttcacaaggcagaagtcaaggtcaaggctctgaaccctcgggatgaagtctcctaaggtgtgttgattcatttttggatctgcagaggattgggtcaagttctgacatggtgctgtaggattctgatccagcagaccccacctgtaacctctgtgctacactagttgtggccccagaaagaccttctaagcaggtttcaggaagcaccttaatggaaatgtttatataatgacagagacttaggtaaagactataagctcgaggaagtatcactctattgcttagaccatccagtggctttctagttgttcagagtaagcactaaagcccttcatacagtagccttccagacccaaagcagcctgcctctcctttaccttcacctctctgattttatctccagccctcctgactcactctgcaccacctactggcctccttgatgttccagtaatcttcctggctatttcctgcctcagggcctttgcatttgctgttctctcacataactgcaagtctcacttccttacccttttcaatctttgatcaactatcactcgttgaggcctttcttaactacctatttaaaactgcaccactacccagtttaaccagcattccctaaatctcttccttgcttacatttttccattgtagtatcaacttttaacacattatgcaacgatttttaaattttgggtattgtctatttcccaccatggattcatccttcgtgcctagaataatgcctagtcatagcagacactcaataaattgaataaatgaatgagtaaatgaattaaactttggaaaattagatcacaagtgtacactgagagatttcttgggaaaaatgaaggataaactttgaacagcattgtggaaagagacattttaataagggaacacagactagagaaatgtcttcaatgttcttgtaatagtgaactgtgctcataaagtttatgagataaaagttgtttttctgcttagtagtgcagcccacgtggtgagtgatgcactcttctggcttttgatacagtagttccttggcatgtgtgaatttaacaattgtgatttcaactatttgctagcagccctagagggtcataccatgtagtgggtttgtgctttggtggacaaccatgtggccaagtggtgagccgaggctgagctggcagatggaaattagatgctgtgtgatacttgtgaattggggaatttgcaaaatgggcctggggaggggatgttcatgaatgtcaagggtctgtatactctttaattattcagtgagtctactctttcactaaaggtctgtttaatatttgtgatcccaggttcctagagtttttatttttgtttttgttttgcactgatactctttttttttttttctgagaccaagcctccctctgtcgcccaggctggagtgcagtggcgcgatctcagctcactgcaagctccacctcctgggttcaggccattctcctgcctcagcctcccgggtagctgggactacaggcacccacccccgcgcctgtctaattttttgtatttttagcagagacgggttttcaccgtggtctcaatttcctgacctcgtgatctgcctgcctcggcctcccaaagtgctggttttacaggcgtgagccaccgtgcccggcctgcactgacattcttttatttgagatgcagagatctgtgctcaatcagggttgagtggaatgggatttaaagaacttatcaagtatataactgagttcaaacagttcaaactattttcaactttacatctgattcccaagaatgaagcagaaaatgaagatgcttgcatgtgggcctcctagattgagtatctggcacaagaaaagcctgcccaaagccaagtaggccgccatttccctttcctttgtagggtgatctcacatccatggtcccttagatccaatgcttttaggagctcgggtcctcacagccctgttccgagactcatgaactcggagtctcaaagcccagatcccattcccacagaagcccgtcttcactgcccgcttctgttcccttccgaactcagattttctcagtctgcttctgcccctcaggaacctgagtcttcgtggccccgtttctgatccttaggagcccggatcttcactgttcctcttctgccacttaggagcccaggtcctcactgccccatttttacctctccggagcccgtgtcttcacacctcattcctttccggtcctctcctcttaggaatgcgggctctcacaatcctgttcctcccagacagatttccctcagatactggagaactcacatccatagccgttccctaagtcccgtctggagcccgggtccctacagccacttcttctctgagcctgatcctctcagtcccttcccaagagcctgaatcctcacagcccatctcatccacaacctggtcctgcgaacactgacccactgtaggtgttggtcctgacttcctcctcccgctcttgttcctcaactgccagagctcaagactccccaagatatttggagagttttaacagatcagtcgaattggctaaaaagaggcagcttgacattgagtgggtaagagaacagattttggagctagtcctcctgggtttgaatcctgacatcaacagttatagccatgtggttttttttgggaatgtgacttaatttctctgtatttcagatatgatggtgataaaaacagtacaaatctcatgggattgttgtattaaatgagctaataatatttgtaaagcaattacaatagtaactaagacatagtaagcactacctaagtgtttgctaaataaaaataaagacattgatttgggggggattgctacaggatgctccggtctttggccagtaggcacaccaaagtggggaaagaggtaagtgatgtaatttgaaattataagaaggcatatatgtatgaagaaatattcttgaagataatccttggtgggcattgattagttaattatgaaagagtatagtagagtggttaaaattgtggactgctaaattagtctgcatgcctggtcttctcatcacatgtactgtgtgattttgggcaaattatttaacttcaaaattagaactttaaagtgggtgtgtgaaaagtccctacctcatggcattgtcatgaagattgaattaaataatcatcacgaagtatttagcttagtacttggcaagtagtaagtatttaaaatgtgactgaaaaaattaatagataatgggccaggtgcggtggctcacgcctgtaatcccagcactttgggaggcctgggtgggtggatcacctgaggtcagtagttggagaccagcctggccaacatggtgaaaccccatctctactaaaaatacacaagttagctgggcatggtggcgcatgcctgtaatcccagctacttgggaggctgaggcaggagaatcgtttgaacccaggaggtggaggttgcggtgagctgagatcgtaccactgcactccagcctgggtgacagaacaagactccgtttaaaaaaaaaaaaaagataatgaaagtccctaatctcagttcctacattgttataggtattgacatcctttagctagaaccttcagttctttccctgttactgagtcagataaaataagatggcatccagaaggaaataatgcatgtatgttgcttagcacactgactgacatgtagcaagaacttaataaaatttcaggagcctcatccctgccagctgggtggtggttcaggatgggagatgtgaacactgtggttgccatgttgggtagaggtaggaaggtttgcctaaacccgtttcagaaggcatcttctccaatgtcagctgtgtgtgtcagaggtgggtgggtcagggggctgtacatgatcaggtgccatggagctgactcccagccctgtgtcctggaacaaactcctgctcttgagtccccatctgcctgccaatctgcatctgatctgagatcactgtgaaatccacagtaaatgtgcaaaagtcacagactacaatgaatatgaattaactgacgattttagttattcatgctattgccgtgctaattactacaaataatttatcactgactgtgtataaacataaaactaagctacaatttctagagcttaaggcttatattgacattttgaatcctaattttatttgcaggtagctgccatccagcttctttataggtttacctaaacacattacagagttttatttgtccagttgcaggcctgatgagcaaaattgaactttcttataactttcctgctgcttctgggtatttattatttttttttagagatagatctcactatgttgcataggccggagtgcagtggctattcacaggcacgattgtaacgcactacagcctcaaagctcctgggctcaagcagtcttcccacctcagccttcctagtagctgggactttaggcatatgccactgtgccaggctttgcttctggctatttaaagtagtttatggtgtgatttatttttaagttcattcattattctgttcgtggaacaaacttttatttagaatcaaatatgtggcaggtccaggtacctcttaatttcttttttagcagacaaggggaaattctcatttgaatttaatttgacccctacatttgagagtatagttatagtctgtgtggagagctaagatctaatgttagtctataaagagaaaattatatagttaaaaatatgcttgaaaaatcccttaattcaaccataaacataatactcttcagggagtatagcacagccattttcccccctttctttggaacaaatcactatttcttcagttgaataacaggctaagtaattggaaatttgcttgtttatggggtttatgttgtttgaaatacacattcagggcctttagacttacagatccacttaataccaaacatgcatgtgccctcactgtgcctatttctaactggttgattgactgatggattgattcatagtcactgaatcaattgattaattgattcattcatagtcactacacatagtcactacacatagttagtagactatgtgtagtgactatgcttgatactagaggtagaaaaacttcagaaagacagtatttgctctcaaagagctcataatgtggtggggacaagagccatgacatgcccaagtacagttgagtgatgataagttataatgacaatgcattgtaacgtgctatatgagaagcaggcacattcaggaagccaatggagaacagaggaaggagcatagctctgctcagggaagggtatgtctgataatgtagagaggcttctggagaggttggatcttaagttgggttttgaagaatgggttaactaagatgatatattaattagaggaaatagcatgtacacgaaggtgtggtggacggttcagggtgtatggcatggggatggtaggacctgagcttacgtttcatgttaagcaagttggatttcatcttccatgtaatgaagaaacactgaaggcactttaaaaggagagataccaaagtgtgttttataaatggatggcttagaggggaatgagttcagatccagggagcccagagagaaaccactggtgagaaggcagatgggaatccagccatcctacactcacatcaaacctgagcattttggggcatccactgactaacagctgccttgcagggtgggctttcagctgtagatattccctttcccgtgattgtcctgtggggtatcatcccttcttccctttgctcttctttccttattctgctgctggtttgggtctggctcttggttgaagagctgatggtggtggggaggaggggacagaggataaacatgcccgtcgccatcctctgtgctggtgtgtcatatggaggagcccagccatttcatcttgcctgattcctgtcttaggacctttctgattttcacacaagaagccttgaagaagggtgattgaaagctaaaagagtttagaagggagcttctttttcctgtctgtaacggtaaaacctctgagaaaatgttggaaggacaaagtatttggtttctgacagaggaaggagactactgtattctacaatggaactctggtcagaagcagcacacggtctttgtggaagcacgtgaaatggtccattaaaaatattaaggagcatgtgagtgtgagtgtaggctaagtcagggaatgtcctgaggagtcatgaatgaagtcctcctttcagcacttcataccctcccccacagcactttctcccttcatctttcaccttccctggtctctgagccttttctcaccccagagtctccattctcctatcaattattttcttgccctttgttgctgagcctgctccagcctttcagaagtcaatcaacaatctgaagacagagtttaggagacttagccctagcatggagaagatggaaagggagagtttgatcctaatagtttgagggacagtttatctgtggtctccccagtcaaaaatcccgtgcatttgctcatgagacagaatcatgacctctgggtctgtaggagtattaatactctattctctgggccctaggaactttatatttgacttaactgaaactggttggatttatttaggaaattatttaattccctaaactaacttctgaagtggtataagctcattttaaaagacactgaagtgagaggttagttaactttctaagcttacacacaaagtgtgcatctgggattttgtattcagttttgcctgattctgcatgtgtgttggtggaccagctgattgtacctgaccaccatgtagaataatgtttctaggggaaattaaaaaacagagttacaaatgagcttttttaaattgaaaattttattgaggtaattgtagattcaaatgcgtatttgagaaattatacagagaggttactggtgcagaaaagctccactttgccagattttcccaaggttaacattttacaaagaggtagtataatgtcataaccagcatattggcactgatacaattcaccaaactttattcacatttcctgttttacttgtactaatttctctctctctcttctctgtctgtattaagttctatacgattttatcacctatgttgatccatgtatccacagataagatactgaatagagccaaccacaggggtccctcgtgttacccttgttaacaacaaatacctccatctttaacccctggcaaacatgaatctgtcctaaatctgtccttcatttctaaaattttgtcactccatataaattgtataatgtagtttgtaaccttttgggatgagcttttctcactcagcataaccccctggaaattcattcaatttggtgtgtgtatcaatagtttgttcatttttcttgctaagcagtatttcatggtatggatgtaccatagtttaaccactctcctgttgaaagacatgtggattaattctggacttttctactatacttaaagctgctgtaaacattcatgtacaggtttttgggtgaacgtaagtttttatttctctgggataagtgcccaagagtacaaatgaacttttaatacagttcataaatccagaattagatttggcgtgatcttgctctgggttgcattttcaccttttatccagttctctcagtctgattttgtgtggggctctcacctatttccctctggccctgggcctgtgtaaatttccaggctgattagggtgctcctgagctctgggaaggagatttgcttcgctttgttgctggctgatctccgggagtcatcactgctatcagtcatgcttgtcagttttgccgcaccgatgtccctttcccccagtatggatgtccagagctccagcggtctgcatagttaagtcagcaactgtgttctgtcttacttcctgtgggaatgaaaggccttcttagagcccctgcgaagtttttttttttttttttttttcccagcccctgtgaaattttaaaaggaatggttgcagctttttcttgccctttggttccctgtagtgaacacatgttgccaaaagatggcagtgcactttgcagccactgagatcgctcttccctgtcgcctggggcttagagaattgtgtcttgttctttatgtgtatgttgaaaatgtgcagagcagattttacaaaacaacaaaagcaccaataaaatgctgtgaagtttagaatcatgaaaaaaaaatcacgtttgcaaatggtttataatggaaatagtcccccacttcttaaacatgatttgaatagggaatagaactcagaaatgtgtgtatgagtgtataattttaggtgtcagtactgattgttatattctgtatagctcctgaaaaagacctgtgaaatgctgatttttgtctttcatctgatccaagattagccaagtaacaggcctgcttttgaactctgagactgcagtcctcaagtaaaggcccttgtatacacttagttttcatggcaaaaatggctaataataaaactcttcacttgctagcattggtcactcccctgtgtgcgtcactttggtgtgcgtctgtgggcatgtgtgtaaagaactgtttaaacattggctatgcaccagaaagctgtgtgaagtgagagattatggggttcaccggatgtcataaacagaccaagctggtgaggataaagtgggatgagttgaaatacaagattagctaataaactttaagctgcatgcacggagagaaccagtgatattaaactctggtatgggcatgttaaacactggtgccctgctgctctctagggtgccatccccgatgccttttgggatggaatcaaaaagccctgctatgaacttgatccatgtgcagcatcgttaagtgcagagcaggctgtggaagagagtgggctagctctgggattgggtatacaagctccggagtggatcctctacacaccagccagtgtgtcaaggttggaggctctgtttcacttcccctgagctcagtaccgcagtcgctttcatcctacagtttacaaagtagctgcaatcctgggtggcagggaaacaggtggcttcacggtaaagcagcaggctttttgctactgcatcctttggcaaaagcttgggctaggaggagaaatgtgctgtgtaaagttttaaccctgaaagcagatgctgttactatagagacaagtgaaatgctacagtgggaggcgtaacaggggagggatgggagaagggaggtgggagggcaagtaaggcgaatctaaaggctagcacactccaagaccttcaacctttagcagcactgtgacggggcaggcttgcattctgaaacttgtgtgctggcggcctgccacgtgctgactggctgagtggcagctgcttgcgctgtgcggactagctggtgagcacgttggcagttggcatgggctctgggggtgggaacttagaggggtggaatgtagatgggtgctcaagacccaatggctgacagttttgcacaaatgtttctcatgctgggcttaagtcacccttacgagcctgctcagtgattaggaccggctggtgaaagccggtccttttggcagtagatatgacatgtgttacagttaaatcattgtggtgtcccagaataacagagaataagaaaaaccttgctttgggtgtggacttctgtagaaagggtataacttgtacggtcagaggcctggctgaaggaaggcattattggccctgagtggattttatactgactggtgtgacccttatccccgtgatgctggtgagaagcttccaaatctattctgaactttgcctcatgctggtgatgtgagcaacccagggagctttttagaaacatgttcttccctttctttgttttcagcgaatgcaggttgtgtgaaaggaacttttaagaatgggtttgagggcctgattaaggactggatgagttaatttcttcctattgatagaaggaggaactagttgggtcagatggttattttaaaagatatctctgtcttactaataatagcaagcaactgctgagaggatttgcggtggggagggacacgaacccaaataattgacatttgtggtgtaaagatgaagaaaaggtgctgaattcctgtattttgtgcagaagcctaggtgcaccaggctggacttacttctaaggaggagtgagggctgctctggagaaaggctgctgtgggtgtacaggttttatattttccatttgcctcactcacctctttttgcttcctacagggaagaggctgctttgagatgctctgcattgtctgtcagaaagaacgaagtttctaattacttgctatgtatagtcttggagggaatgtgaaatatgcatcaaagagccaaggaatgcaccaatcattattctctctctctaattcagatggaacatagtgacagtgcctcagttaggctggatggttttctcagcctaggaagagggtttttctgaacttttctactatcccctccagtttttgctggtttttattttctctttgtttctgtttttcttttttcttttagagatgagaattcactgtgttacccagactggaatgcagtggcctaatcatagctcactgaagtcttgaacttctgggatcaagcagtcctcctatctcagcctcccacgtagctgggacaacaggtgcacaccactgcacatagctaatttggaaaaaaaaatttcagagatgggtcttgctatgttgcccaggctggtctggaactcctggcctcaagcaatcctcccactcggcctcccaaagcattgagattacaggctgagccactgtgtcagcttttcttcttttacttctttggttgttacatgcaattttgggaatggcttaggcacaaggctaaacattttagttaggaaatttgaaaaaaaggcaacaaaagactttaggaccagttcgattaatagtggggtgcagaaatgatgttccacatgaaattgtgttggactctataggttggaaagggttagttctgataggactggaaagggttaatgtgagctaaaccactcttttttctaaaggggagctggcactattaatgtacgtgcagtagcacagggcttcaggattttgttgtgcttctgaggtcttttaagaaaatttcctcattaaactgtcatccttatctatgtctacaaatgtgtaatggatgggttcttgtcttttgaacttatttgcctggattgctaagggtaatctttgagaaggtggatgtgattgcattaggcaccttgtctgtcttgctcactgtaactctagtgccttggcttgtgcctgcaacatagtagtagcatccagtaaatatttactgaatgaatgaatgcaggaaagagaaaagagaactactgaatgcctcctctgtgtctgctactgtgtgtggtatgtaaaaattatatttggcaattagaagacattggtgatcatgaccaaagtgctttttacatctctttccatctttctcagccactcggtagcagtactctccttttgtcacttccttgacatcactcttgcctggattcttacctcattgactgtttttgttcctctgctctgcttgtaaatgttggcatgcctcagcacttggtcttaggtccactccttgatttttacattttcttcctggatgatctcatccagtaatagcttcaggtaccagctttattcattggtttcctaatttttatctctaatcctgagcctctgagctccagactcagacatctacttgtatgtccgatggctcatttttcatgtgtaataagcatcttattcttaaagtggctaaatagaactcttgatttgttccccaacaacttgtttctcccatagccttcccctggctccttcaatattttcttaatttctcttgtccccttactgtccatttttcacatagcagccagggtaatcttttaaaaatgaaaaacagttcaagtcactctccattttagaactcttcattggctcccgtaacacctaaaattctgactccttaccctggttttgtggcccaatcaatatcatctcctaaagttgaccttctagccctgtccagctgtactaactttgtttctgttcctgcaacatcctaaacttgtcttcaccttagagcctttgtacttgctgttccctttgcttggaacacattacctgcaaatattcacagtactgattccttcctgtcatttttgtctctgctcagttgtcatccagaagcctcatgtgaaccaccctgtgccaagcagtccctgcctcattttattttccacaaagtgcttaatgctatctgagattaccttgttcatctattcagtattaattcttgcgaactttgtttctctgattcacagatatatttccctctctctgaagagtatgaggaacatagcaggcactaaataaatatttgctgaaccagtgaatatactttatcatttaatcctcatgggaaccaggggcttagagaagttggtaaatgacttgacttcttaagtcttttcttttttttgagacggagtctcactctttcgcccaggctggagtgcagtggcgctatctcggctcactgcaacctctgcttcctgggttcaagttatcctcctgcctcagcctcccgaggagctgggattacaggcgtgtgccaccgtgcctgctaatttttgtatttttagtggagacggggtttcactgtgttagtcaggcttgtctccaactcctgacctcaagtgatctgcctgccttggcctgccgagggattacaggtgccgggattacaggtgtgagccaccacggccggcctcaaatcttcaaggaattttcttttccaccagaatcttgatggccaacccatatcctgcttgcattcagttttctatttttagtttgagtatagagaaggaaaatgatgtatatcaggatgggctattatatacaaggccgatattattgaaagaagaaatcttgcaagtgtccagaggtaatgagtttcttaatgctattgtccaccattgactggtcagggtgaaaaggaaggaagcagaaaggaaggaaatttacagtaattaaacatgtagtatgtgctgagtcctgcactgtgtgcttttaggtatgttacctaatttgaatctcaaagccatcaatgcatggttgatattattgtgttgagtcaatgcaaggttgatattattaccccagttttatagatggaaaaactgagacttaaaaaagctaaaaactttgctccaggtagcacacttgttcagtggtagagctagatttcttaaaccgggggctacctgacaccaaatttctcactttttatgttatgatggttgctttgtgagatggatatgcttctaaaatagtaaggacaaaaatatgaattcaatgcacatccgcatagattataacaaatatctgaagcacaagaataagttatacagacaatatggaaaacagacctacaatattcaatgcctgagcatataattggatgaatagaatacagaatgaacatttggttctctggcagggctcatgtacggtatgacatagagcagctgtccccagagaaagttctttgtttctagactggtactacacaagcagcatttgagcaattcaggatttctttctgctttcactataaatagacctcatggaattctgtatatcaaagttaatgcaatgaaaaggagctgcagaatatggaaataaaccttaactcattctataaactagaagcgtgtttggcatcgggaggccctaaaaacgctgtcattccttggatggattctgaggtcttatttagcatatgaaattgcagagtagatcctattatgtaaggagacaggaggacagcataatgtggttacaaaatgaagaactttgtgcccttcagggaagagttaacagggcagatatacatagagaaagatgtgtgataagaatgtggaaaatgaatgaatgggtggcatgtatctgtgtgtattgtcgaagccgggttgctggataatcctcagatgtcagatttccgtaaggccagcatgtgactcaaagcttgccactcaacagagaatactgggctgtgctgatattaagaggctggctggaagctaggctcccactgtgcactagcctacctccctgtcgctctctgcgtgtgggtgggtgtgcatgtgtgtgtgtgtgagggtatacattttatgcagtgggtgtttaaagagctaagcactgaagctggatttccacaaacgatcatcacgagcactccagacacaccaaacttcctctcttggtattttttttttttttttgctttcatcctttttaaaaagaattttaaaaccctaaaggggagagcccccaacatcctgcctacaggattgggattattttctcttacctgtctatgtgggtgccctctcaaggttagaactgaagctatgtgggaccggcatattctcgagcaccagatgagaggagctgcgtgaagcagtagcagacaccagaagaagagtgactctgccctgctaacatgaacaacagcttgcaggttaacctgcccagaagctgggctgctccaagtggctcgctccaggagaagtctgagcattctttttttcttttttattactataggatggaggatgaagctgtcctggacagaggggcttccttcctcaagcatgtgtgtgatgaagaagaagtagaaggtgagctttatgggtctgggaaagtgtctgttgacatacatatgtctctatagataataacattcatgcatttcatatatcttacatttttaaaatgaaacaccaaaccttttctatagagtttcatcaatctctacatttgcttcaacacagaaagtaattttaagaacttcactggaccatcaaaatctgattcaatatgggtcttgcctggtttaaaaaaagtcttattttaaagtaagtgcctatgttagctgtgcctcttcatcaaaaataaacattttaccagataatactaaccaccttccaatgactaattcaagaaagctgctcgatttatataaatatattcagcagcatctttaatattctttcttgtagcttgtagtgtaaagatatagatactacagaaggataatgataccattgttgcaggagaaatgggtttaagctgaagatgttaagagtgataatcatggatgactgtcagttaggaaaagatggacaagcattttttatttaaaaaacttcagtctcttttgctgatgtttcctagtgcctgttaaaaactaaagaagagttatgttttacctggtgctataatactttcagcgggcattcccttttcctgtctcctgacttatcaataatgtgggaataatgctatttatttgatagaaggcaaagctgaattaatatttattaaaataattatatgaaggcatcacagatatatgttattattcatatttataatgagatttttaaaaatcagggttataggcaatactcaaagttaaatgaaacttgcaggtgaatcatgtgatcaattccaccatttaaagtcacctgagagacaattcatttgtgttttggagattctgacctgaccggtgccatgtggtaagcatttagtgccagccccaaacttgaaccagaaggtggtgggcttgggaaaaagagagtcagtattgtatgttctggagtgattcttcaagcagactgagcaccaggtactgggcaagtgatgctcctgtgccacttggaacagtttgaatagtgtggctatcatgttgtttctcatgtttctttagtaagtttcttcatcccatgtggtgttagaggattggcgcctccacccgcccccctcaacttcccgcatttatgctcttgagactgactaataagaatttgatgcctaagtttcttaggaaaacggaaactacagtattttctttcatattgttttatgggttccttgcatttttgcaacatgctgtgggaaaatgtcaagctggtgaaagcaaaatagtaaaacttttgtcttaagattcttggaacccatgatgttaaatcatcattttagtgactctgtcactgtcccagtgtcaaagaggagataccagcaaagaggagatacaagcaaagaggagttatagcatatgaatataagaaataatgtagctttgagcaaatagcctatagttttaagacaattgaagtagaaaaagcttgggagtgacatatactgtgtgcgtgtgttttcctttgagaataatgttctagctaggttcacaagagatgtaaatcacttcttgagtttgtaaggtctgtaggattgacagtactctactgaaataggatattgtatactgtttcttaaggctttgactaaaaagtgcgtttcctgaactatttcccttgattttcaagcacaaaattaagacgacaatataaatgaatagcacacaaatctgtagccaggattctttaagaagaaacagaaacacaaccaaaggtggtagaaacatctgtaaaattcaagaaatgtgttggttttgtgatgattaaaccgtccaaatggatttgtgtgttttcctgtttttatgagacctctattttagtgactgtctttcatgttgattggcacctgagctgactacatttcttccaagacatgctcagatagttgccggttgctgagtcctgagccccataagaagattgcttatggattattttgtgggtaactttcaacagtgctgactgtcttacagtactagccttgaaattatagtaattgctcatttgaaatgaacaaaattgttcatttttaatttggtgttctcccaattgaccctccccctttttcaccttgctttattggtgggggtgggaggtcttagatttttatagtagctctaggtgatagtataaaacggttgaaatggacaggggttttttggcacatccatggttccagtgattgagaatgaagaaacagacggcctatgttaagacctctaagaagtattcacattttgaggggaatgttttttcccaaggatatgagtccatctcatatttttaattgcatagagaagagtgtatctgaagaaaagcaaactgttatctctattctaaagtagcttcctggcacatttatggcagaagtgaatgcctcagttttaagggtcagaattcaaaaggcaaggagctggaacactttatattattatttacattttcttttatgaaagtagttatttctgttgcttctaggataaacatagaagtttacaatgtttgtaaacattcttggcaaagtcaacttaaaataaaactttgttttttacagttatctgcataaataagatgtactcccaataagtgattattaaagtaactaaggtctgatagttcttgttactttgaaatatttgtgctttaaaagtgcttagggtcccctaatttggggtgattggagtcagctcaacctgaaggcaagaagagccagatactctctcttagttgcttcgaatgctgtggttctgaggagagagacttcaaaccacgccctcagttcaccttgttcaactttactctcagtgggtggcatgacacttaatccacattctaaaaacttaatagaaaaccatcaactgcaaaactcactaagcacagagtgagtcacaagaggagtcatctgtttaagtaatgaatttatctatgtggcatatatttaaaggcctaaacctcattgtcacataattttcttcatgtgttaatggcttaaagagatactctttcaaaatgaaaccaagtgccaattttaatctttaaaataaatagaagcctttaaatctgctcttccactggttaccttgtactatgcgtggttttaaagttaacatttttaggaggagaggggttactgtggataaactcattttaaaatgtcagtatttcagatattcatatttatttctttatcaaaatgccccagctcccacccaggcccttccacgcttccacagaattggtctgtagatgacaaattaacattaccagaatgatccataagtgttgaccacgaggaacaaccactcacttttcgtttcaaacatagatgggggaaattgctaattacgtagcaattacgtagtgattgctaattacgtagtgaatgaagattgagataggaagagtcagtcccaggtaactttttccaaaaacagaagaaaatcctatggatgttttattcctaaaaaagccagccagaattttggatctgtatgatataaacagattacttaatagtctcatattttgcaataggggaaaagagcaaactccaccttatcctttgagataaggctttggctctgcaaggctaggtaactcccagcaggccttggcaactctgacttcatgaggaggggcctcttcttaacatcaagttcaaccaacaactcagaaaatataagatgcagtaacacagtattggttgaaatgtgtctccatttttgaggcttggtcagtactctcctagagctattatgctatattgtgctggttttcctcttccattcaaaacttaatgcagtgggaagtatgcacccatctgtcccaatggaagaataattctacaaattcacatgtctactgatggacattaggagggagtgttgttgaaaatgcatggaatttacaggaggattgttttcaggaaaagtaaaaaaagtatgtcagggtctgggacagggtagatattcactaattatttgttaagagaaagaatgaataaatgaatgtataacataaactaaataaagcatatgtagaatcactttgtataatactctgacatattttttaaatttttttgttagaaatttggttctcaaagcctgacgtggtggtcatgcctataatcctagcactttgggaggccaaggtgggaggatcacttgagggcaggaattcaagaacatcccagaaaacatggcaaaaccccatgtctacagagaaataaaaaaaaaaatagctgggtgttgtgcatgcctgtagtcccagctactcaggaggttgaggtgggagaatcgtttgagcccaggagatcaaggctacagtgaactgtgattgtgtcactgcactccagcctgggtgacagagtgataccctgcctcaaaaaaagaaaagagaaaaggaaaagaaaaaagaagttttgttatcttagtactcttattctaatgaaatgatatagcctctcatcttatccttggtattactcctgcttgattttgcagagatcattatcatacttatatcatttatatatttatactgataagaaaaagaaggtcctaaacacctctgctttatcaaactttttcattctcctactctgttttttgaagagagagactaaaataatgaaatggtggcttttgtctttttggaagtcaagacctcaacattttacagacatgaaatcatgacttaaacctatttcttgctagaggatatgatgatcatctactcgtgtactggagaaggtagtatttttttctaaaaaaactggggcctggtagacattttttaattattacaatggtataaaacgtaatttctgagaaggagtgaatgaaaacctatcggatgggcagggaggggccaagttgggactggggctattctgagcgctggatataagtgtccggttgcattttgctgacctcttctctgctgttcactctaattgctcagaaaaacagtgtgtacagaggaaactcttgggcaaatactgctaaaggaaaagccttcttaaaaggaaacaatgtatccacacattggcccactttaaagaaatacagtgaggtttttaaaagttggtacttgaatagtaacataggtttcccagaacaggttgagcccatacagacctttcccagcttcctgctcctttctcctcatggcctcagctgaacgctggccagaggtcctcaagtatgcagcacttagctctgtagctgcctgacatctcttgctgtgtcagggaagttaaatatttatatatagatttctttcacttcaaggaaggctgatgatagttccgtgtgtttttgaaactagaatcagacatttcttctgagaatttgagaattttccaactgcagagaattccctggtagtatagtatcggccaaagccctcttgaagccatttcctatcctaggtgttggtgttctttgatggcaataagccataccaaattgcacgtggtacttgcattgtgtttggcaaggatccagaaattctgaaatagtacacttatagcagttttgcctatagattgagcttctttttagaagctttttatctggtcatattagtgagacatgttgtttgatatttattttggggagtctctattgtttattttattcaagtgttgtcaaagcagaggcactaagtatcagtttgagaataaaaatttaaaacttgctctattgccaaatcattgcataggtgaaggaagcaacttatagtttagattatgggtttttctctttgtaaaatgggagcaatggagcatgtcattcaccttagaactcttaagaacttccaacagcaattgctgctgtacctggcattaggaacaggagtgctttatactccaccactgtctgttgtttttctttctgatggatacagcctcaccaataattttctttggttattataatcttctttggttattataattttcttttaattacttaattaattattttcttataatttagttattataattttcttataattttatataattttctttggttattataatcttttctacaaatcgtaactggtgtaaatattgtttacttgcttaattcatttctccctacatctagcctttgccttcctaaccatacttacctactgcttcttatattggaaaactaaagccagaatgatccattgaaacttcccaaggcttactctctgtttgcctttggactcattctcatcctttaagctctgggtatgaaatctaattttcacagttagactgctctgatacacattatccttaatttgttaaattgtctttttttccaagaagagggatattaaccataattgtatactgggtaaaacgcaaatcttgtccattgtataataaagcctgcaatgttgcttcatttggaaaatggattcaagaatgtagtgtttttctgcgagtgagaaggattcaagagtctagtatgtgtatatgtatttaaacatgcatatagaaatgcatttccccttgtctgccacatagactagaatacttctgcttcctactggccattatgtaatttaggtgccaattaaatgagattatgcaacagtatggaaatactactatatattctaacctgaactaaatatttccccttttttatcaccatgagattagaaatcattgggagaactgagaattgggcctgatgagaatgagtaaaataagaatataataaagatcagttgaggctttcttgttgctgtcatgagcttgctggtgagattttattttattttgttttattttattttactcttttggctgattgcatttaggtgactgaggtgagagcctgcaatggcataggttcacgggaggttccaacattcatccctggatctgctgattgccaggtgggatgaaaggtgaaggtagtgagggtggtgagtgacatccactgaatcagcagtatagatgacttaaataattcatttctctgaatagctgaaaagttttcaaatctggtaaattgtttctgcctttccatagagttagaattagaaggcagctatccaaagggctatatccaatgtgtgtacctttcttcatattctgttgatttttggaagaacagactctacttagacctcatgaaatattattttagtgactattttcatggtggaatgctcagtaacttttaccaggccaaaaacttccgggaataaaaagaggttttaaattttagtaacattggccagtatatcagctttagaggaatggaattacattgttatagatgggttaaatcactacccaacccccaattgattattaaattttcaacaggaaatttgattcctactgaaaaataaagaaaatgtcttcaaggtagaatgaaagcccatgattgaatctaatggatacgtgtgtttgacaaattaaattagtatctgattattcaagtttttactcgcttttattccttctgttctatggtttagagaacatggtggtggaccagtagtctcaggacctttttctgttcctggtctgccactgcctttctgcataatacaaggcaaatcattgtcatgtggttatggttccttcatgcaaagtgcagtgagtaacccatcttcttagccacctactagaaatgctctaagaatttttggataatacctgaaaaataccttgatacttccagtaagccattaagaagttacttaatttctgaatctcagttttttgtacaagatagaatttgcacctctcatctcctacttttttctaggaatataagtaaagcaatttgaaatcccccaggattaaccgcataaatttaaggtattatctcccttgcaggtaattgttgtatgtaatttatctttatgtgcaacactttctcaccagtggttgctgtgactgcagaacactttcacactaaagctaatactaatatctggtaatcaacagattagttgattagtacttacgttaactcttcttactaaatttaagtaactgatggaccatgctttttttttttttctttaagccgatcaaaatggtaagaacagttgcaggtgtgacctctaatatgttgcttttccaggcttatgtgtatcattgaatgtgataacattgtaactaggaccatgattattgtttagtcaaataaaccagccattatttaaggacacaaggttagttgacatggtaattttagagatgtatcacatacgtaggtgagtttacatggaaggccagggaatatatctcctacagaataacattaaattgagacctaaaagaggaaaaggaatttgctaggtgaagaatcagggaagcattccaggcaggcatgtgtgaaggtccagaggtgagaaagaggtaggcccatttgagaaacagaaataaggctacagtagctggaccatgtgaacagggggagagttctgaggtggataggacccagataactcaaggtcttttatgttatgctaaatattagcattttattgagtgtgcactaaggaaacattgcagaagggttttaagcaaggaagtgataagaccaaatttgtattttagaaaagattcctttggctgctggatggagacagtgtcccaagagggcaaagacagaagtgtgggggctgttgccaagattcaactgagagatgattttgggttggacaagagtggggacaaaaaagatggagacaaatgtgttgaattgatgggtggatgtatggatggggatggctgcttctggatttctgttatgagcaatttaggggatcatgtaccattttgtaagatggggaacagtggaggaagagtggtgggggatgataggagtttagccttttgtatatattgaatttgaagcacctgtgagataccgcagtagaactctgaagccggtagttgactatacaagcaggaactaagaagaaaggacagggatggagatataaatctgggagtcctaggcatatagctagcatttaaagccataggaatggatgatattgcccagggtcaaagaatggagtgagaagaggactcgattggactctgcaagtgccaacatttggagattaacaaagtgcagtcatagaagtaggaggaaaactgggaagagggtgaagcctctgaggccgagaagagggcttttaataaggagctagcaattgacagtgctgaatgctgccttgaagtctggtaagatgaggattaaatagtagctactggatttggcaaaaagaaggtgattggtaacttttgttaacaatgtgggtgtcatggttagttgggaataagagtgcccaagagaaaactatcattatgagaagttaggaagagactttgaggtgatgctggaaaacgtttagcctttccctctatgtgctccacttcacttaactaattaaaacatttggaattattatagatgttttagaactagaaaggatcttagagaaaatttagttcaataggctagaggaaccatgaagaagttaaatgatttcctcgaggtaaccttggtaggagttggaataactaggacaaggatccacgtgttctgactttcccaaggctgtgctcatcccaaaagagtgtgcttgaggttgactccctctgcagaggaaaaggaatttaggtagggagatggatgagaactaggagaagcacctggaagaacaggaagtggaaagacctgaaaggaataaaaggtgttgaaagagcttacagagaggtgagagggaaagaagacataagactggctgcagcatttgaatgacccctggtagtaagtgggaagacagatgtcccagctagaacattgtcatattttggagcagtttatggaactaagggtggtggatttcaatttgtcattctgtatctctaagacaaacatttccagagaatcctgagcccatttttcccttctcaataattactaacttgaaaggattaatcgttattattcttttggctgttttttccagacagtggaggatgggagggatgggtggaggactggtaccatgatagtggaaaaatgggaaaggaaggcttatatatccaggggcactaggagtcctagtctctatacgtcattaattgcctatttgactttagttagatcactggtaaatgaagaggctgaaccggttaaagtgatttttaggccactttaaaagtgtgattatgtgctgctgtgtcaatgaatgtcgtccctctttttcctgggtgcatgtggaaaaccacagtattgaagattctgggattctaggttaacagaagtctctcatagcatttttcctagttctgggtaattgttatagccctatggtattatctacatctcatttacctacatatgtgtatatgaaggaagggaataatgtgaactttaatatttatattttataacaaatataaattaatatttaatatattaaatatttacatcaatattttatataagatataatatttaaaaatatgttcatctactaatacaatataagatatataaccatatgtaatattttgcatatatgatatataattatgataatagattaacatatattaaaatatataatatttatatattatattaaatagttgatacctgattagccatgagtgtattgactatattgcagattacctgtctatagcaaccaaggacccttcatcctattgcccagccagggcttaggccactgcaaaaagagaagccataatagagtcagagatggacaatgtggttggaatgagagtgtgaacgtgtgcatttatgtgtctctctaagctgcctctctggctgcaattgcaaatccagttatcaatgaccactgaattagctattgtttttttatcttccaaccctacttcccattcagttgtgcaaatggtgaccaaagagaaatgttggaaactgtcagttctctgtgtttggctcacaggtggattttgtctgacagcatgtgtactgcatattacaatgcagtagcccgtgtggggtggttctgggtgtcgggataagtggagggttcatgtcttcccgttgggtggcttctgctcactctgagcactgttctgcctagtgctggacttcctaggccttttggctctattctgtctcgttggagcaagtacaaggacttacagacctgtttcctgcagattggcagtgagccattgaaagctctgggggaaactttgcccaaatcagggtggagattgccaagcccttgcttctggacagagttagggaagattgaggttatggaaggtgctgcctttgttgaagagctcaactctgtaggatggctaaaactgccgattaagggacaagttaagaataggtctgaggttgactcttttgccctcctctaggtgaatgttctggagaacaaagagtgttcacaagttagttattatcagggctggaggtgggtgggaatgagaaaaaactgtgctctgtttttttctcctttgaaaagggaagggagaaataggatcaacatttatgcagcacctttgtgtaccagacacagtgggagactatgtttaattcagaatgtgcattaaataaatatatatttatatataatctctctataaagattatatagagatagatatatagatatttgtataggtaaatttatatctatatagatataattatatagatatagatacattttgtatctatagatatgaaagattttgctagagcaaagttaacattattttggagaatcaactttgaagattgaaaagctcttcaggaactgcagtttacatagggtaacctgatttctaattttgttaattccttaaggtagattcctgaagtaactttaaggggaaattcttgtttttctagctaagatcttttcaaataattgatgatcactgaacataataaagttgtatttctataaacatattcactaattcagactttatagagtgccagtcagtttttgcctttactatcagccattaataatggaaacttcaaaggaagcttaacttcagtatgtggtcttaggcgcctcaccttcatctaagactataattaatagaactgttttattaaaaatgagctcttggaagacagatgcatacgtttgctgagctaaaggacaggagtctagctaacaatcataagcttgtgtctcctttgagaccttttattctgtagctcttagttcttgcctagagattgttatcactattattatcatcatcaaatattaaatattaatagtgctgtgctcagtgaacatcaagtaacaagctaagatttcttatcagtcttgcttggggaacctcaggttgccttgaggatttctgggaggctttcagtatataaaattcccatgcagttcagtgggaagaaaagtatttccctgtttttcatcacatttgtcatttgcttgcatgcctggtcctgtgtaataggtagcgttaaaattaaaataaattacttatcagtattcaaaattatctatacataaatgacatatgtaatacgtaattatctattaataaacacattattttttatgtaaaaaaattgcccttatccatatataaaaatagaaatcatcccttgttctgagtctggaccctcatgcaaaatttcataaagggctggtttaccccctggtaactgcaaaattatgctgtgctttttgaagggggttttcttctcatgagctggtatttataccagtaaattagcaatgttactttgcttgtatcttattagagctgcttatggacactcttatgggtttgagaataataagctaacaaattacttgtattttggctgagcgtggtggcttgtgcctgtaatcctagcactttgggaggccgaagtgagtggatcacttgaggtcaggagttcaaaaccagcctggccaacatggtgaaaccccacctctaccaaaaatacaaaaaaactagttgggcatgatggcacatgcctgtgatactcaggaggctgaggcaggagaatcacttgaactggggaggcagaggctgcagtgagccgagatcgtgctactgcactccagcctgggcaacagagcgagactctgtctcaaaaaaaaaaaaaatcacttgtatattattaaagtgtttaggattatacatacttgtccatttcttgttaaataaaagtgtcaaccacacagtgtccactgtgcctggacttgatactgtagtttggtttaagttttcttatgcatatacttttaactgagatttttttttggtccaacaagtaaagtctttgcagcatctttttataatctgtcactcatccagggtctccgcctcttctacatttttcttttcttaataaaaaaaaataaatctcttaattttgttctacctacattcctcttggcaatagctacaacatgtcttgggcatcttggcagaagaccaggttatattagataagccagggaaggcagtatttaactcatattttgggaatattgctgattagttctgaaagaagtatataaaatgctgcatgttgtagaatctttgctttgaactggagagaacagaaattcagctgaaagagtaagagtgtggctataaatcaaatctggaacatccctcagtgtttaattagagatgtatgtaagaggctggaggtaggggatggatggtgggaggtggggaaaggtagacttctgggtaaagattttacctgtcctttggtgatcctttagatagaatacagtactgacatatcaggttaaaaaattatatactaccttattccaaaaagctttagggtgaagggaaagtaactgttgaaaagttggaagaatgaggttgtgtataaaatgcacgtcatgaaactctatatgctcactacgggtttgcctaaaatttgtctattctcttgttagcagccaatgaggaaggtgacataataagttattaaatttatgatataaatatagtatgttttacagaacacaccatcaaagtagtgatgaagcactgtactagtcttgatactgagaacagagacatatttctcctgtggggttttatgaagagaacacttcatacaaagttaaatggttataatgtccttggcttcctcaaactgtggtttttgcacctgtacaatggggataggagcaggattgcatgaggaggtagatataaaacacctcgcagtgcttggcatgcttgtaagtattcactaaatagttgctatcatctgtatgtacagtaaacacagcaacatgtttcccaggaaggagctaatagatgtatcttacatatagaggcatatgttgttaaccatccactcagctatagaatttgtagtttggctgatctaaaacccttttctggcttgaaggttttcatacttcaaagtgttaaatcatccttggtagcaaaatgtgtatttgtgaaagccaccttaatttgaatggctccagagttactaagtgtaagttttttgtttgccagaaaacattgtagcaactatgagaagtatgaagttaggttagaaatatttcaggaattgggataattggatgagttaacatcatagtacttcctacttgcaactggggtggagcatgtaaggatgggaagaaacaagaatcacgtagtgatcatttctgacattcagagatacccaggaaagccatgttttctttccagtagtactggctgtggtacggattgggagatattcccaagatatttagagtttgttgggaacttgcaccatctgtcagagaaaggcatgcagggtatttatttgaacacatgatactgaagccactgccaaatcaaggactgaatgctctttgacagcacacctaaatgaacactgtcaaatgtagattccagtagttttacttcatgaagtttcagtagcaagaatgtaacatttattttgataacatttaaaacgatcacttcttcctcatacattatagctcttaaaattttttccactcctcctttttacattatctttggaagcagtatttcctgagttttctagtggagaatttttttttagcctaaaaagttctgtataagaagcaggttaactatccctgattctttaatggtcttactgttttgtagtcccttgctgggttggaaagcttgtctgtcaagtttctccttttcatattacagggaaaacaatactatatcctcagctttgtgactcccctaagaacttgcagtcattttatgagttataattttaaaaatagtcatcagtcttcatgacatatcccttaaacaggtaaagagattttaatgaaaataaatattgagatccacatgtgatgttctcatcaatcatagcatattttcaacagtaatgatgcttctattgatcatgatgacagatattctgtgggggcagtgagaaagcttccattacagctcattttactttcggtgttttggttacttggcacatatagcttattaagtatttgattgtccctttgagacagcatgtctgtattaccccatccaccaaagcaaggctatcttgctctcttcttataggcaaggaagctgaagtgagagaggctgagaagtaactgatggagcagaaagcactgtccctgagcccctcaaggtttgcttaaccatggaactatgttccttgtcctctacctgaacacaagacagaaaaggaaaatttagttaccaatcacatgtgagaggaggaggatgctttaagttttgaattgctcagctcagtggcttgatttcctctggcagttgttggaaggcaatatcttcctcatccagggaatattgtattttattgtgctgtaaggatgtctacaaaaagttcattgccatatgagtactagagaatggtagcttcgcagaggccatcactaagagttttaaaacgtggtcaagagtggttgcattagacaggagtgggaacagagagtgactgcaaatggatatgagggatctttttggattggtggaaatgttctaaaattggattatgatgatcgttgcacaactctgtaaatatactaaaatcattgactgtatcattaaaatgagtggattttattgtttataaattacaccccagtaaaggtgattttaaaatgcctaaaatttggcatgtcttgagaggaacaacatttctgcttgacctctgggcaccatagcacttcacagtgcagtgtcaattctgaacgctcccacacctgtgtggaagtgcacagggaaaaccaagaaggaggagttggaggaaatggggatagacagaatctgttgctgagaggatgcctatcatcacgatgtgaacaaaatggcaccacttatgtgataatgacaactcaaagtaggttccaaaaagtcaagtgcatttctctccagggtttgatggctcactctctgaactggcctaactctttcattagattgaccatgatgacacttcctagccagtaatcttaccttagcatcttatccacccatatagactgtctattaaatgatttgatcaaatgtactatgcagatttgggtaaatataatttaaaaaacctttctatataacatcatatggcaatatagcttaattaccattttttgcttagccgccatatttaataaggtgaatagaaaatatttaatgtgataggtttaaaaaaatttttcaacctcttaatttgtgtgtgttttcttgaaaacaaccaagcatttcgtgtttgatttattgaagcaattggttggctttgctcacttacattgttaagacttgagataaaacttcaggactccctcagtaactggagcacaggaaacaattgacactgtttcttaattcacattgtttctgagacatttcctacttcctagtataatatagctttcccatgagaaccatttgcttgcaaatggttacacatgatagatacacttctcactggcacacattctgtggggagaatttcactgtgttttgtagtagctgagttgctgcgtgtgtgttgggaaggaggtcctgctttatgtaaagatgcctccaacttcattcaagcatctgatgtcttcttttgaatactaacccattcacttaggttctgcattgcttagctggaatatctttcctgaaggagcatataattctttgaagcctgccaatttaaggaaacacccctgccaattatggtgtttttagatataccccgtaggttactgtggaaagtagttcatgacagtttgtatcatacatactgtatgtacatgtatttgcatgtaggtacgtgatattggctgtggcattgcaaagttgtcatcaaggaataattccggaaatgggaaataaaacccatagatgagaaaatctaatctaatttgcagttcagacaaaaatgttcacattatttctcaaatggtagttcctaaaatacagaagttatgctgtatttaaagtgaaagtagaagtttttcaatttaaaaaatgatgtggaactttgagtttctttcttttttgtcttattagattttgtaaaaataataccacttgtcagttttgcagctccttccatctagagagctgaaagcatttcacaatcttttttcctcatgcccttctcttcaaggcaatttttgctgggctcggtttatttttatcattgcaacaaccagtttttagaaacttttggaaatgaaaaaagaaaaatgagaatggcactgtagctgacattcattttagctgtttcctagtgtgaacgtttgagtatttctaaaatcttttctccaagtatgtcttatttttctcagtttgtcccagttctaagtctctattttgctgattaggtaaaaaaaaaaaaaagttttaatgtaaagccttacccccagcaaaatgactttttgaactttgataaatctttatttttgcagcgccagcagctccttttccagcaggcactaaccctacccagtataatcatagactcatgtaaggctgaaactggagggccctctagggattacccagtttaagtctctccttctagaaatgatgagaggcccagagtggttaagagatacatgcttaaggtcagacaactaattgatggcagagtatgacaaacatgaaggattcctgatttccagtttgatattccttggttttcctaaacaaaagtagtctatctggacagaattagagtacactctcacagagtcctagtgtcagccactagcttgaattatactgaagctaattgaaaattgggaggaaattttatttttctagagtttgccaaatatagaatggtaacgttgaatttatagacattttcttctgatctgtgtatcttgtgcaatttgtctgcagtagagaatgtggtttgaactgactggtgatttgtgtaccttccttaggccaccataccatttacatcggagtccatgtgccgaagagttacaggagaaggagacgtcacaagagaaagacagggcacaaagaaaagaaggaaaaggagagaatctctgagaactactctgacaaatcagatattgaaaatgctgatgaatccagcagcagcatcctaaaacctctcagtgagtactctctgagcgttggtgcctctctctgcctcactcccacatctttgagaaggacacctttttgaatcttgtggctaaaggggagggacactgtaatactgagatgtttagaatctgttctaaaggataatgtctgtggagatgctttgcttgtaccagcaggttaatctaggaggtcatctggtaagattctgagttgatcagaaaaggcctgactaagtttaggcatagctgtgtattctacatttttatgtgtaatagggtagtattgcagatggtatttaactacagcaataaacagtaactggaagactcttaaagaattttttgcatggtttatgcttagaaataggttctgttgagacagcaggtgaagatgagagtgtatgtctatatatttacatatcttaccaaatgtcagcattacaggtgacataaaaccaggttatgagtcaggtcagtgatttaaataggaattgtggaaaatcatcctgtaagagagatctgtagagtgacacagttgttaagatgttgaatgtattagatgtcatacactggataaaagtgttactaagagcagaatagcaggaggtcaaagaacacccttgaattcaagtgataggataggctgtgtgtttagatgtatgtttatgttgctttttgtttctttaatgtggagaatatttggctacatgggccaaatattgtggctgaactgagaatgaatatgtgcagtagaaacacatgccaattttggaagattccccaacaggagttacacagtgacagcttttcatgttggcagagctctgtacattcttcatgtctttgctacagttgcagaaatatggaccctgcaataaaatgcattatggatggcacagataaagatcgggttcagtcattgcagttgatgacaggccaaattagaatgaacagctcaagggtgttgaaaagtgaatttacagagttaaattaaagagggtgtgaggcatagtgatgtgaattttttatagtctcaccgttggaactgagcaggtggcttaggaagctagagaagtgcggtgctaagaggagaaatacaggtggaccatcgaattaaagacagaagcttggaggggagcttgagatggatcatgaaatctaaattaaaagcattgaaataaatttaagacttagaaggaccagaaggcaggagactcaagttatgtacttttcactgaagtactgggggaaggtctgtctgaaagggatcctttacatatcgattaaggtagtggagtctgttttgagaaaaggccttaaaatgcacataaacatggcacagttaatagtctggaggaacaaaagataacattcttttccaaataaatgactaccatttatcttgatttactctgtatccatctgtcaaggcctgagccagtgtcaagtgttctgtccattgtgcatgtgattgtctactctctctctttctctcctctctgtgtcttttataacttgtctttcattcttcagattagaacaagagtgcatcatcactattaatgttaaaaagtaaagaggtgctcacctagacaaataggcccaggaattttgagattaaaattatatatcagcttttgagaagggcagtggaaacagtgccagcagcactcagataggtcataaggaatgaacagatcaggaagatgctgagaccgcatgtgtatcaaccatagaatactgttgcattctgtggcatttggggaccagtttgaatacagcatttaaaataaacaaggcaatccattctctttcccctcagaggtttcttcctgggggaatactgcattatgttgtatactggttttctgaagggatcctatggagagacagttgttaaggactaaattgttcagtgatcataaaaaaattatttataagtatgcattttaccgttttgttcctgctgatcaatgttatacactaatatgcctttggcatatttgatatgagttatccaatttgacatgaagattctcttagaaattgctgtatatcctcagctgctttgatggattggtagttaattatttggtacagttctgtttaaaagtcagagtttttgcacctagatatagaaagacatttaaccccatgattttgggggaagccatagggctctggcaccaacatgatgacaaaattgttgtgggaaaactgaatgaaatacttgcctactatactattattgtctctcaagaacagccacataacagtttctgttgttctgtgacctatggtgtttgagttgcttatgtccatagacataccacgtcccatagacaaggttcccacatgtgtctggcagtgcgcgatgtgatgcttatacttctgagaaaaacaaaaaccaaaaagcccacatataaatagtaacttgatgggagtcatctttgattctttccttgctctcaccctcatatgcaatccttcaatgatttctgttggttcaacatttaaaatagatctgaatttttctgttcttttcagttttgcggtcacatttttgtccagggaatcatcacctcttgcatagacactgcagcagtctctgctttttaagtatttcttcatagagaggcaccattgatcatcataaagtgtaaattggatcatgtccttcctctgctgaaaacttcccattgtcctaagaataaaacctcaattgggcatcatggcccagtgtctttctagtcctgtgatgtgccattctctccttgctcactttactccagatacattgatattggagttccttggtgctaaaaccttttctgcctcagggcctttgttcatgcaaacttgtcttcctgaaatggtcagcccattcttgtcctggttagtttttctgttcctgtatgttctggcttttaaattttacctcttcagagagtcctttccttactactctctctagtgcagattccccttcattattctttcccaacgccttatgtttccttcagaatatatgttttaacatgtgatttttgagagcttacaggtttgtcttgagctgttgctggattgtaaactccgtgagagcaaagatcaggttgtcttgttcactttgttatctttggcgccgcacaatgcctggcacatagtgtgtttttcatacgtgtttattgaggagtaactgaatgaatgaattactacagagaaagacgtaagcattgctttaattggtctaaatatttcttatatcctagatagagatccagctgattttcttgtttttaagcctggaacatcgtatttatatttccctgccctgcctttctcccttggcacataaaatctggtcttcgcttttaattatcccactttggaaagtgcctcattattttgtctatcgccaaagtgggattttggtctgggtaggtaactcccaagtgtgtgcagctgcttgttaaccacaggtgagggatgaaactgaaccgcaaggcacattaattttttatatacacttaaaaatgctcactgttccacagagcaggcagccccccttcagaagccatattaaggtgacatgagctggcaccgtggcacatgcctatagtcccaggtgctccagaggctgaggtgggaggatcatcagagcccaggagtttgaagctgtagtgctctatgattgcccctgtgaatagctgctgtgcttcatccgtggcaatatagtgagaccctgtctctacaaaaacatgaaagggcatttataagaagtaaacgaaatatcttccagtatttaggcacattaaggagatggcataattaacaggttcatttagtttataacctaacgctttctattttcttcatggctttggtgtcaagaccgggtttctaaaaaataaatgagtgtttgatttttacacatttggagctctgaggaggaagcgagctagcttcgtatccccctctgagctcagcagcagctccaagtcctttcacagctgctattcccagtgtggcgtcagagctggtgtcccagctggggacacagagaaggaaacgtgtgtgagagcgtggtgcactgagccatggggagagagaagctggggaaggaaagtgaaatggaagaacaagcaggagagacaagggaatgaggaggtggtgtggagtgggtggttgagagaaaagttagattgtgctctttcttaaaaataatccttttgcctcctccactgtgcattttttttttctaagttagcagctgccatcctctgagggttgcccaaaaagtgggtgggaaggtggtcctggctgagataggctttggaaacacagcataccttcccagcctacatggttttggcctctgtgcctcccattttgttagtgtccagggatacttatgggggcatcacaggctactttgtgactgtagagatcctgaagatgtgtaagatggtaggaaacaaagctacaaacagaacatcgtgttcagcattttgatctgatgtgtaagatatttcttgacaagcatgaacatgcattcatgcttggaggtgctaactgcctctcacacacaggtcttgcccgttgtggaatcatagcgctaggtatgtccatacagacactcattcagtcttgtggtattcttttttagctttttggatgtgtaccagaactgatggatttatgctagtgaacattgttctgtgagcctgggacaatggatgctggttggtgatccagttatattcaggaaactgaaacagagaaatgggcagctgcttttgtttggtgcttccgggtaaatgaacagagtagcttttcataagagccaagaatatttggtgttgtgtcatttgacttccccttttcccagtgcacacccctcccaacctgacctcatacttcttggtacatttgtactttttcttgatttttaaaatgttttcaggcaagatccttaattttgataccataaaataaggtttctttaattttctacatgccattggtattctcaaaaatcgatctatatataggagaaaaggctttggaaatgtatgaaaatgaggtagacctgtcccagtttaaaaaacaaaacacaaacacaataaaactataccatctctttcatccccttctctatttttcaccttatataagtaggaggaagtactttgtctttaggtctgagtacaaaagctttttatattaaaaaatgttttaaaacttacagtttgccttttcagaagggacacttgtgttgtaattttgctggaaagggagcatatcagagtggttaagagtgcatatttgagccagattacttgagtttgaatcccagttcataccagcagtgtaaccttggttatttacttaacttctttgtgctctagtttcctcatatgtaaaaaggggatgatcgattttaatcatagtattctgaacatgaagtgagcactgcatgtagtcagcaataatggttagcagttattattttgagttactatgattgccttcttcaagcttatcttttcctatccatcatacacaggtaatgccaaaaacttgaggctaaaactctgtagagcttaattccttgtaaacaataaccactattctttaagctcttctggtcttttctgccacaaattctcactaggcgttcttttgctttagctgtcggcttggctcttggctcctaacggcatatttgagagaagcaacctaaattcagtctcttatcttgccagtgagtgtcagtctgcacgttggctggcaggtgagaggaccaagggaacaaggacttcaaggggcagaggtgctgtctcttgtgctgctcttttttgtggaatactgccaccagcaagtggcttggtgtaccaagggtgtccttgaatttagtcggcagttgtaattccccgttctggatgcctgaaatcaaatagactgttctgtcttttacaggaaggatctctttctggctctttctttgtgtttctttgtgaaattaatctggttaagaagggctgttgggtgggacaagtcagcaatttggaggcagtgttgtgcagaaaggaaaaatatttggcatacttgtgtttttgatggcaatgggttggctcaacaatgttgtgttttgtgtggtacaaataattgttgtttattcctctgtgatgctgatgaatacaagaggactgtgtcatagtgcttctgcttctttagccagttaactgcataagtctcttagagagccttgagtttctgaaatgcagctctcttgaagtcaccttgaagtgcccttcaaatggcagattttacactattcatttcttgttgccactggctattctattctaatagttattccatgttatcatgccatgagatgttatgagtagtgtgtttacacgtgtcatgggagagttgatgttgttgctatttatagtgacttatgagttcaggagacctcaaagggttctagtgtactccacgtgctggggtgctcagggctaaaaagagattgtgacttagggtggaaaatggggggaaaccagaatactgtgcagaatttcagtgtgaaatttactttagtgaagtaaatggggtataaatgactgtctgccacaggcattaccacctaagcggaaggcaggtcacatcctgtggtttgggattcaaatttacaaggcaggaagcttgaatgtgtatttgtgagtttgtgtgagtgtgtgtgatttgaatgcactgaaaaaaagaaaggtattggcaagggtcttcttgaaatagtattctgtttaggaattttttcatatagaaggaaataattcttaaagaacaagggttcttaataccagggatttaaattcagggctttatgagtgtgaactcataaatgcagaagtagttggggtgagggaccacgggcctactctataaataaattctgcggaattcttccatgaccacaatctggaggcaggaatgttaggctcttttaataactttcccatggataggagtcttacttgacttttcatcacttttatagaggtgttgcgagcaaggagtctccattttcctggttaatatagaatcaagatccaagttatcctttatccttctctgttgtttttcttccatagccagccatgcactgagcgctgttggtttttccttcaaagtttctcttatgtctgccacttcctttgaattcctaaggcaatacttcttatttggaatttcagcgttaagttcatccttgaaatagaagggagttatttcagacaaggctgccagacatctaaaatattagttctatagtctctccttaattaaataacaaacaaacaaacaatcctttttttttttctagcaaacagtatttattcccctttccccccgggtgtcatttctttgggaatagaaaaatgaccttgttttgtgtatctagccaacaattcttttttttttgttatactttaagttctagtgtacatgtgaacaacgtgtaggttagttacatatgtatacatttgccatgttggtgtgctgcacccattaactcatcatttaacattagctatatctcctaatgctatccctcccccctccccccactccacaacaggccccggtgtgtgatgttccccttcatgtgtccatgtgttctcgttgttcaattcccacctatgagtgagaacatgcggtgcaaacaaacaatccttctattgctcatcattacttaaagtaatgagtaaagcaacaatgtaacaaagtttcctctgctactttcaatattttatgtagtttaatgaaaattatagatgtactgtgtctcagcaaggccaccttaagttcatttttatgaactcataataacttccccagtttttgaactcttgcagcaagtattatctacatcacacaatctgatacttagatatgtaatgcttcaaatggtgacttacctctgtcattcagatgtatgtcatctcttcagtattatcattagagactcaaaggcagaggcaatattgcatgcttcttttgaatcatgttctgcaatagcatatttgttgagtggataggtaaataaaatgcccagaaattacccattaggttaaaataatctggtctatccaagaaaatttacaactatcttggttaagaaaatgctgtccctttaacctaaatccttactgaaaagtgattaaaatataaataaccaaagaactgtccactagagtgagttgaatcatggtgcaatgaaaagagagaataccaggaaaagtcttttttttatgctgtagttctacaatttgcaataactaatttgtacataattaaaatagaaattgtgcatgtttttaaaacagagatgaaagtgctacctgtgtatttttttttcttatgggaaatatattacaatattaaaatgcctgaaaacatgaaggtaagtgttggaatgcaaaatattataagacagcatttctttaaagaactgtatagctttctgagttggaataagcctgcctttgcttatgattatttatttagggttcatattccactgtgttgagtgaggatagagcataaaagaggttacttatggcagtgatatttgttaattactgaatgtgtcactgaggctgtttgcggagttttttttacatggagaactttaagagttggtactatatgtgtatctgggatagatatacagattaaggtccatgttgctttcagagatgaaataagatgactttagcacccttgtcaggattatgatttactgattctgaaacaagagcataactggaatgttctattcttttgctatttgccaattagcagaattctattatttaaaaaaacacattgcacatgatatccttactttagaaactactcctgatggtgatggtattgttattaaacactttgtatcaacattatcttttgtcatttatcaaaattttaccacaaagaccacaagataaaccaattatatttaactgattctacttcatttatgaggctttgtgtaggaataatttaagtgtaatggaaaatatgacttctggatgcaaatgtttaataaacatgtgggctgtctagctagctgtgttcgttcaaagctgaagctgttttcctcagaaaatagggcaatttctgttaccaaggtatggaaatagcagtttctataactagaaatttactgcagattcacccagtatccagaacacatgcatgagcaactataaaatcctaagtcaattatttgtctaattgtactttgttacttcttgtgacactgctgaatgccacaaacaacaacaaccaagcagatgggcaaaaacgcttcaaaaggattttagattattttttattgatgtccacacacagacacagctaatactcttccttggtcctctgattcctaaatataggttttgagcaaaagatacgctggttaagaaagactgaagataggtagctggcattccagtggccatttcagttagatcaaatgctaaccaaagttttcaaaaagtgtggcggaaagttttgtgagctattgtttgcatgctccaaccacacttggaaggtttatagattttttgctcttcgtgaaactgactttggaaatctgtctatgctatattttccttaaacctcttttatcctattattttatgattctttctgacattagtaaaaacatctaagcagttaatacaataggataaatttgaggatgttctttgtacatttttgtgtataggaagaagtggccaagatgctttcctcttctggcagatggagagaaggtgctgtctttagtgactgagtgcgagtggggaacctttgattttgtaaaaggctcatacaagttcagatgaaaaagaaatcaatcagggcaatgtataagaagaaaaaacaacctggagactatatttatttttaaataacaattgagttttaaaaatgtcattgatttctgtattttggccagtcacagggaatagagggggaagtgcagggataacactgaaagtaaaaggagagagaggagatgatttattctgagaaagaagcagaggaagtagaagaatgccatcaagaaagacaatgagattaaagaaaaatcactgggtgaatggcaagggctaacatcttacctcctcaaaatagagctctctataacttaataggaccagctctctacatccaatcctcaaaccggtttcaagtggcctctacctgccttatctttagtttcctagggatagttttttcaccatgattttcaaatgatcatagtgattctctaacgattttccctttattcttatgttatcattacctctttgtgttggttttagactcatctctaccagatgttcctcctataagaaacttgggccttgtcttatagttatgctagtccttttcctaatacctgatttttaaaattaccagcataccatatgataaatatctttagctttctaaaatttctttttaaacataccctagtcttctagcagattatttaatataactttcaattctataatttaaaaagtataaaattcagtttatactttttataggaggtgacctcaagtctttgttcagccacaagataaagctggactaaggtccagctttaacaaagatgctaccctgagcgtccacaccaaatccaaggctgtcctcttggtagtctgcctgatgacagaggaaattcagagtcaggcagtgggacttttttggaagacagctgggtctaggggaatttttgtaagcaatgaaccattctttaattgtgaaaccactggatgtggttagtagtttattttaaaaataccatatgttagttcattcctatatactgtgacaatcatagtttaatcaaaagttgcttgtgacatttctgttagtgttcataaaagagtggcttgcttccttgaaatcctgaactctgtgccaaatgccagcacattgacaattacagtttggcttttaggcaattgtgcagctttttgagtatgtggtaagtttttatttatttttgtcactttcactaatttgtcatcttcttaaatggaaaaatattttctcagcactttgtttggtaagtagggacttttactcttttctccatggttccccgagaggaaataagctaatgtaactgcttttcgactcttttttttctggccagaaagccaaatgaatgcatgatctcattgagatacgatctatttgtatgaactgtaagcttgtaagcttgtcatcatccttcatggtcctggggcaggcgcctggctagccactgtaacaggatgaggaaagagatacagcaagatccctgagacttcaattcagtgcagtgcaagtcaattcatttcaattcagctcactttaatccaatctaagaaatatttatggagtactttttaggcatagtcctgggcactggggctatagaaatgaaaatttcatgaaaactgacattttggtgggggaaataacacaaatcagataaatttaagagaatgtggtaattactaactacatcagtatcagtatcaggaaggatgagatgcctcattcatccatccatttcttcatcaaaaatatttattgaaggtctacaccatgtaccaagtactgtgctagatgttggggtgatgatagtgaacaaaattaaagactttctacccttggggagcttgtagtcagtttggagagacactaactaatcaaatacccatacaaaaaaatgttaagttctacctttggtatgtactgttggagtgtggcccatggtgctgtgagatttgataaaaggtaggttctgatcaaggtagggaggttaggaaaggcttctctgagaaagttatgcttgagttgagatctgaaggatgagaaaaaaaaattttggtgaaggctgtaagtgaaaaaaatactgcaggtcacaagaagagcacaaaacaaggctctgggccaggagaaagcatgatgagtacaagagtggttatctaaggcaggccatcaacactgaccaagtatgtgaggcctcattgaggagagttccatctaaaaaataatttcattatctttgactaatatttgaggaaatggccaaggtgggtggatcacccgaggtcaaagtttgagaccagcctggccaacttggtgaaaccccatctctactaaaaatatgaaaattagctgggtgtggcagtgtgtgcctgtagtcctagctactcaggaggctgaggtacgagaattgtttgaacctgtgaggcagaggttgcagtgagccgagatcatggcactgcactccagcctggatgacagagtgagagtctgccaaaaaaaaaaaaaaaaaaaaaaaaaaagaaaacgaaacgtaccaatttcagatgaataattatgtgtattaaatgccatgataaaagcacatctatatataaggcatacagtaagttgaagtactgatttttaacctgagtttaaatggagctttatggttatgattctgtgttttttctcaacattgtttatctgcagaaccactcccaacttctgcttacatcttataaccttttctgcaaatatttattcctatgatatcagtgtgccaaataaagtagtgttttttttttttttttttttttgccactagtgaatctcagcaaaagcttttggcattgacacgtgaggtgcattcttatcttctcaagtggctctatgattttgtctattttcatgtactactccactggcagccaagataatcccttaaggataccaattctacaattttagaagtatagaaggttggaggggcaattcattctgggtgaatatttcagtaacattggctgtaaatcatacccaggccttttctttctgtgactcacgtgatgtaaggaagagatcagatgacgaggtcaagaggacacaaaacctcagccctgcttctgctccctcaatgtcgtccatccaaaatgactttacatatgtcaccagagcatggaagtgtttatggcgatttatactttggttttggtttgttagcttattttgtcatagttaggacaagaggagacatttctgatgcaaagggagattttctttagccagaggaattttgaaacctttattactaagtacaacagagtatttttgttcattgtacttttgaagtctgtgatcaggaaatgtattttctttaaaaataaatcagaaaaggtctcaggagggcctcaatgactgtaataaaatgtttctcagagcactttttatgttttcacactttgcttttttctcctttgctgcaagttgcagttttccatcaaagttattttggatggtgttgaaagttttctctgggtctttgtgcatagttcagagggcattcagggaactgactaagccgcgttaactatatgttgcaaaatgttttatttttgtgtagtgctgtataacatatagaagctttcatacacagaaccctaactgttccatagcccttgatgcaatcagaacaaacattattcctgttttagaaatgcaaatcagaggttcccacaggctaaacaatttgcctggggtcacacatgctgtgttgggagtcagaattagaacaaggtctttggacttctggtctgaccctctatactaactatatggtgaagctgacatagtggagttgttgggctaaaaatgaggagcctttgatagggtgcagtcaaatcttggaggattccattattcatttctccaaagctgggtatattcaaaattagaaaattacagctatgaatagttgttttccacttgattggtctaaagtcaactgaattctagagaaaactcctttgaaagtgtgttgccttggaaatggatgatcgtagcagtataatagcttttaccgtatttgaaattccagcagtttaggtgacagttgtgtctttctgaagggtgtgggcagattctgaacgggcttttcccgttgctcatcagcttggccatggctgctcttattacagcagtcactcattttcacagatgtctttaaaaatttttttttgtttttcttttctgagttcagaacatgtagaagtaacttctttttggcatattgcattgcgtgtctttgcctagcaagtagttggtgttaggaaatgtgcatggacttaagtgggaacacataacatttgtcatgtactatagacttaataaaggctgtcatgtccatgattatgtttaatcctcgtaagaaccttgtgagaaatataatgccagtgttatttttcccatattttacaaatgaagaaagcaaaatttgttaaaaaactattatacagtggttaagaccataggtttggaatcgtagtttgtgtttagatcccagtatactttacttacgagctttttgatggtgggcaagtaatttgactgctctaagtctccattctcgtgatctgtgaggtaagatgataaagaaatatacctcaccaggtggctgtgaaggttacctgagtataaagctttcaaagggcactggcaaataatacagcttagtgtatattagttattatcattaagtaacttaatcacattcacacattagcaaggagaagagctgggacttgaacctatgacctttggttgtttttgagatgaagtctcgctcttgtcccccaggcaagagtgcaatggcgcaatctcggctcactgcaacctctgcctcctgggttcaagcgattctcttgcctcagcctcccgagtaactgggattacaggcacctgccaccatgcctggctaatttttttgtatttttagtaggggcggggtttcaccatgttggccaggctggtctcgaactcctgacctcaggtgatccgcccgcctcggcctcccaaagtgctgggattacaggcatgagccaccgtgcccggcagaacctgtgacttttaactccagcttctaccttgttatttttccaaaatactaggaatttccttctttctcttctctatggcaagtggctgctacattaagttgttagtgaaggggatgggttttggaataaaagacttggggattctgtgagaacatttgacctcctggaataaatcagcaaattacttaaaaatgtagaaacacactccttattattaagagctacttggttctaacccaaactgaacttaaaaacatcccctactctgactcacattattagtatatgaatacttttggatgtaccagttatgtgatgtatccactgtccttagtaggggattaaggatagatgttgggttcccacattataagcccccttgctcccctcaacctttccttgcatggacctggtgagagtgaggggtggagctcataggctcattggggaacaaaccatggtctcatctgcactgtcttctaagcaaatcagttagattaaaagcaaaagaacaaattagcttgagatacttactgaatttggattgccccttgaagtgtttacatttatttccatcctgcctcttctcttccagggatccctgctatagctttttggacagcctaggtaagcatggtggctgctgtgggtgcccaccactacacatctttcacgtttgcctgcaggggtcctcagtgctgcaccatagattatgtctatgtggacaccttcacttgtttaaatgttcacttctctgattataaaaataataatacctgacctttacatagtgcttgacaggttacaaagcatacttgtatacataaatgattctgagggatatttagaggttattatttctgctttacatgagaaaatatagatctgaaaggtgaaatgaattacctccagagaggggacaagtatgagaagtagttaggacttgaacattccaaatctggtgctctttttacagtacctacagtgatatcttctcccagaaatgaattaatgtgttggctagttaatagcttctcacattctacaaaagatttgaggggtcttgaaataataaaatatgggtggaaatagaaaccaaaccagggagaacacacaatatccagaaccactaggattaatattgttcctacagttgaatttaatttgtctttgagcttcctggcagccaagataaaaagaggcacaatcagttacatatttcttattagaaaaggaaaaacatgctacagagaagtggagattttactaggattgtattcaaaataattgttttgcttgaggccatagataaggagcaataagaataaatgaagataatgctctcaacaaaaatttgtagctactcaataacataaaaatgcattgcaagggggctaacatttgctgggtgcctattatgtgtctggcactctactagtgcatattttattttattctgcatattttattttatttaaccctcatgaacatttaatgatcacaactatcttttaaaggtatcattgtgaccatttaatgataaggaaactcatcctcaaataatttaaactatttcttcaaggtcacgtagctagtaaggagtaagccagcaattgagatccagaccttgtctgattctacagcctgtgtcctcaccattctattcatgctgcctataatgtgttagagacataaattaactaaatgcaagtatatataatcttctagtgtttctactttatccaaggatatgttttacaggacccagattataggttggtcttctgtaaacatcatttctctcatctaggcttcagtaggaggtgagttgtagaaaagctcatgtagtggtgctgcttgagagtgtttccccagagtgttaactgtggctatgtgttgttgttattgaatattaagcactttatacactaccttctttagtcttcccagaagcccaataaggaaggtacttatttccattttgtagataaggaaagtgaggctcatggaggttaaatgactgaaagacatacaggttctcagtggcgggattcagacacagatcttcctggctctaattagcatgtgctttaccattgtactagagggcgtcatgttaagcaagtggtaaagttgttaatctcttgaaaaaatggatctggactcttgtttggaagaaagaccatcttgcctcagcactgagatgactgcaggaggacctagagacaagtttgaattttcctaaaaaggcagttgggtcagcctcggcatgtggtcgagctttatgtgcacagttccacatcataacgcatgaaggatatgactttgacatgaaaagtgttcaaagatgctgttcctgatgatttttcacaactacaagaaaaccttaaaaatatttcagtggattttattttatggggtctctgaggaacctactaaggtgaattaagtactagatatagcaatgtcacaaattgatttgaacaaatttaattttgggaaatgcagccaaaataataattttagtttagaatggttaatttagaatggttctttttgacagtcattaaataccagaataaattatgtgaaagatgtcactccaattttgtgattgttctcataataataactgccacgtctaccatcactacaataagaataggtaatgctcactgagttttgttctgaatgcttgataagaaatagcttagttaagcctcataacaaccctatgaggtagatataattattaactccattttatagatgaaatgtagagaagtgagtaatgcacccaagggcattcagcaggtaaatggctggctcactgcactagtctgtctctacatatatagtggatcagataaagatatacatgcccctcttcttcactgtgggggagcatgaaaccagttcatatgcaagtacttttaaatcattaaaagcagaacttaaaaataattggggcaggaattcagaagaagcataatattgcttgcttagttatgaggagaccattcccgaccaccctaattcttgcagtgggagaaatgtaaaaagactggatgtctctattgagctcctgtagtttggttcatagttggtttcagtccccagggccaaaagctagttaaagtttggaaaaggtcagtctcatgacattgttcttgatacgtttcctcacaaggtaatgcatagtgtttgtattactgatagtagggtggttttgggtaaagccgacttgctccttaaactgaatattagactgaggattctagaattcttttttttttttttttacaaaacaaaaaattggcataaagttttgaaagcatagataagtagttgagaagtagctctgagaagcatatgtgtcaagcgttgcatgctggaatcagattgacctggttcagatgcatgcccttgaaccagttaactaacttctttaagtctcagtttctttatctgaaaaatggtggtaatactgtctgactcatggaactgttgtgatgattaaatgagataatcaatataaagtgcttagcctaatgactgacatataaacttaaagtaaatacagttgaaacttgaacaacatgggagttaggggcactgacctaacaccgtcaaatctgtgtgtaactgttgactcctcagaacttaactactaatagcctactgttgaccaatagcataaacagttaatgaacacattttatatgtgtattatatactgtattcatataataaagttagagaaaataaaatgttattaaaatgtcattaagagaatcgtaatgaagaaagaatatatttactactgattaagtggaagtggatcatcacaaaggttttcactgtcgtcatcttgacattgagtaggctgaggaggaggaagaagaagagcggatggtcttgctgtctcaggggtgacagaggaagaagaaaatttgcatgtaagtggacccatgcagttcaaacctgtgttgttcagtggccaactgtatgtgccatatgagatttcccattaaaaatggtataaactaggtactgagttcattcagatagaattaaacatgaagaaataaaacaaatagtttgacaagcagtgggggtcactaaacacaacattcctaagtaattcagttgtcagaagtgcagttcccaaatgcagttagtatctttagaggagttagaagttctgattatcaggctctgtagaattttttttcatcctgagagagatgagggtgatcccatgatagagcagagaaaacactcaagaggtggagttctagcctagctgtgccttttactagctctttgacttttggacacttcgtttaatgtttggggcttcaagttactgagcagtggaatgaagagtcagtgtggataatctctacatttcctaccagctctcatattcttttattctaaattagtttaggtcataaaaaactagataaattagtcagtgaaaaaagttgccagaccttctccaaatagtctcaaacaaaacagagaggaaataaatgcaaaataaaacaaaaactcaaaagtagtttgctgaagattctgtttttttttctaaaatgtccatttgaggccaaatgaccccttcttgtctttcattgattcctttggagaaatgtcctcagctcattcataggcctaggatgttttgcttccttccttgattgaaaaagtttctttaaaaaattctttcactgccacagcaggagtgaacccaaaggactcaggcacaggaaatgtctttgctttaattgttgccagtgccagtacagcccttttccaagttgccctgagctgtcagcagagtgaaactatgaatgaatcaaatgaatagggaagataagtctaaatagcagaacacatttttttttccctccaaaagaacaactttgtcttgagcaaaggatcatttaaactgaagatgcagttggcatggtgccttggaaaggcttgtcactttctttctacaatacttcctgaaaagttttcctttcatttgagacttgttcaaactggttatcataatttaccttaaaatattggtgacagggggtgatggttaaacgtaggatagattctataactggttctttgcctttcaaggtttcaaggtagtaaggttttcctcagaaaaggagctcttttttctttgatagtactttgagaatagtagtatcttttagcaggcagacacatcacaaattacctatttaaacctccacatttaacaggtgaggcaactgaggacaagtgatttggccaaggtggcacaaacagttaacttaggccttcggccctcaagcaaatgttttcagtaccacaccacatttccttcctatattgggctgcggcttcctagttcttacataataactcaaacttactgcatcagtaaccatttcccaccaacattagaactttagaagagtagaaagatttttccatctttctgaaggcatgcttctaaatgaagttgaagctggtgatttacctctgttaaatccacgagatgtggctgccaggctctcctgaaacgaatgaacatgagaataacaaagtgtaaacattcatgactgaactgcagtttccaagacaattagcaagccagatccaagtgcagattgaggacccaaagaaggggagacagtatggcagtcattctggagtaatcctgcagcactacaaactggcataatacagcctttttaattttgagaaactttttattttaaaaagattatagatttgtaggaagttgtgagagatagtacagaaaggtctcatgtatccttcagtccatttccccaatggttatatcttatataattagagtgtaatatcaaaaccaggaaactgacattggtacgatgtgtgacatcgtatgatgtgtgacattggtgcgatgtagttacatataattttgtcatgtatacattcatgtaactactaccacaatcaagacacagaagagctccatcactacagagatcttcgttgggctatctctttatagttacaccccctcctttcacaccatccctatccctggcaactaccaatctgttttccatctttgtaattttgtcatttcatgaatgctatataaatgaaatcatatggtatgtgaatctgctttttttttttttagatcttcttctttttttttcccactagcatagtgcccttagttccatctaagttgttgcaaatcgttcattatttttgttgctgagcagtattctgtggtatggatgcaccacagtttgtttaaccgtttacatattaagaggcatcttggttgtttctggttccaggcttttgaaataaagctgctggccaggtgtggtggctcacgcttgtagtcccagcactttgagaggtggaggtaggtggatcccttgagcccaggagttcgagaccagcctgggcaatatggcaaaaccttgtctctacaaaaaagacaagaataagccaggtgtggtggtgcacacctgtggtcccagctacttgggaggctgaggtgggacacttgagcccaggaggtcgagtctgtagtgagccaagattgtgccactgcactccagcctgggtaacagaatgagaccctgtctcaaacaaaaaacaaaaaacaaaacaaaacaaccccaaaacaaataaagctgctatgaacaattgtgcacacgcttttgaatggacattagttttcatttctctgggataagtgcccagtagtacaattgcttggtcgtgtggtgaatgggtgttttatttttaaagaaactaccaaactgtttttcagagtgcttgtatcattttgctttctactgacagtgtatgagtgatctgatttctctctactctcaccagcatttagaattatcattatttttttattttagctgttctgatagttgtatagtgataatcttgtagtcctaacttgcatctatttccctaatggctagtggtgttgagtatcttttttgccatctgtgtatcctctttggtgaaatgtctctttatatcttgtgcccatttcctactggcttggcttcccttcccttcccttccttttccttcccttttccttccttccttccttctctttttctttctttctctttctctttttctttccttccttccttccttccttctttctttctctctctctccttccttccttccttccttcctctctctctcattcacttctctctccttctttctctgtttttctttctctttttctctcgctctgtctttttctgttgagttttcagagttctgtatatattgtaaatatgaattctttgttagatatgtgatttgcaaatattttctgccagcctgtagcttgtcttttttctgcttcattgaggtatagttaacaaataaaactatataaatttaaggtgtacaatgtaatgattttatatacatatatgttgataaaggattactgcaatcaagttacttaacacagctaccacctcacctagttactgttgttttcttcagtgagaacatttaagacctacttgtagcaaatttcaagcataccgtatgatattgttaactatagtcaccatactttatgttacatcccagaatttattcatcttataactgaaagtttgtatccttggaccaacatctccccattctcccaacctcccagcccctggtaactgcccttttactctccgtttctatgggtttgactttttttttttaattacacataaaagtgagttatacagtctttgtctttctctttcttacttatttcacttagcacaacgtcctcaaagtttattcatgttgtcactagtagcaggattttcttcttttttatgtctgaataatattccattgtatatatatcacagtctatccattcatctctggatggacactttggtcatttcgtgtcttagatattgtgaataatgctgtggtgaatatgtgagtgccaatatccctttgagaaactgatttagtttcttttggatgtatcccagtagcccagaagtgggattgctggatcctatggtacttctgttttaaattctttgaggacattccatactgttttccataatggctgtaccagtttacatttctgccaccaatgtctaagggttccctttgcttcatatcaacacccacctcttgtctttttcataatagttatcctaacaggtatgatgtgacagatgtcttattgtggttttaatttgcatttccctgatgattagtgatgctgaagtcttttcttgtacctattggtcatttatttatatgtcttctttgggaaaatgtctaattaggtcctttgtccatttaaaaaatgagattgtcattattattattgttattactatttttgctgttgagttgtatgagttcctaatatgttttggacattaatcccttatcagatatatggcttgaaaatattttctcccattccataggttgcttttcatttttttccagctttattgaggtataattgacaaataaaagctgtacaaatttatggtatacagtgtgatattttgattaatgtatataccgtgaaataattaccataatcaagctaatttacatattcatcactcatgtagttatcattttttgtgtgatgagaacacttaagatctattcttttaggaattttcaagtatacaataaattattattaactatagtcaccttgctgtacgatagatctccagaacttactcatcctgtctaattgaaattttgtaccctttgagcaacacctcccattcttcccacccatcccaccagcccttggcagctgccattctgctctctgcctctgttgagtatgacatttttttttctttaagattccacatataagtgagatcaaggaatatttgtctttgtgcctggcttattccactaaacataatatcctccatgttcatctgtgttgtcgcaaatgacaggatttcctgtttttcaaaggctgaataatattccattggatattatatatctatgtatgtatatatacatatatccgtatatgtatgtattatatattttatccatttatacttgtgttgattccatatgttggctattggtgaataatgttgcattgaatatgtgagtgcagatattaatatttccttaagatagtaattttgtttcctttggatgtatacccagaaatgggatttcttgatcacatggtagttctacagctgattttttgaggaacttccattctgtgttctataatggctgtctaatttatattcctattaacagtgtatgaggattctcttttctccacatccttgccagtgcttgttatttttttttatttatttatttttttgagatggaatcttgctctgttgcccaggctggagcgcagtggcatgatcttggctcactgcaacctctgcttcccgggttcaagagattctcctgcctcagcctccccagtagctgggattacaggcacctgccatcatgcccggctaatttttgtatttttgtagggatgggatttcaccatgttgggcaggctgtcttgaacccctcacctcaggtgatctgcccaccttggcctcccaaagtgctgggatcacaggtgtgagccaccctgcccggccaatcttttgtcttttggtaataaccattctaacaggtgtgaggtaatgtcttatattgcatttccctgatgtttagtgatgttgaacattttcagatatctgttggttatttgtatgtcttcttttgagaaatatctattcaagttctttgaccattttttctttggctattgagttgcatgaattccttatatattttagttcttaaccccgtattagatatatggtttatgaatattttctttcatttcataggttgcttattttgctaattgtttcctttgctgtgcaaaaacttttcagtttgttgtagtcccatgtatttatttttgcttttgttgcttgtgcttttggtattatagccaaaaagttattgccaagattaatatcatggagtttttgttttcatctaggagttttatggtttcagggcttagatttgtctttaaactatttcaagttaatcttgtgagtggtataaaataggggtccaatttcattctttttcccagcctgtagcttatctgtacattctcttaaagtgtctttcacagagcagaagttttaagttttggtgaagtctagtttattgatttttttcttttatggatcatactttttgtgtcatgtctcaaaaccctttactaagacctagtcctgaagatttttttctctgttatcttttaaaagattttttagttttacatttaactctataatctctttcaagttaatttttgtattaggtgtgaggtttaggtcaaggtttatttttaacatttatttttcacctaaatatgaaaatatctatatgaaagtgcacaagtaataagttctcataaagttattatgttgcccacttttttttagataatgtctgctacaggaagtggtcactgcaaagaaataaaaaggagagaattaatatatatttgatactttttttgagcagctgaatctttacataagtgagagttaggagatttcaggcagagcaggtatccaagaggtagctctctcaccccaaattttgtttcctgacttgcgtttgcatgctgtgtacttaactttgagttagacaatggatgctcatcacaaagcagatgctagacgttgtgtttagcactgaatatcctgcagtgggcctggagtcacattcaacgctctgcttaagggctgcaaattggggtctgagtccaactttgtatttaatacaatgctgaacaatgattaggcaacaagagtacgtttggttttgacggaaagcataataatataaaagaacactaggatatatgtcaggaggcctgggatctaatgccacatgtgcattaagtgagtttatgtctttctgcaacttgggaaactagtatgagccccggttttctcctgtgtaaaaacaaggggccttgaccctaggcagtctctgaaatctcttctaggtttaaattacatggttctaagaaatttttaaaataaaatggactctggtttgatcttcattttctcttgctaattagaatataaaaccttgatatgagaagtgataattgaagtttaatattgcatttaagtgtaacgtgttagggaaattctccctttggaatacataacacaacatgtattatattaagtgtttaaatatttctaatgctacagtgggttattggcagattcttcctccttcaaaataatttgagagattataatgccacactaaatatagtgatacgttagtattgccaatgaaatgtgaactgtggatttgtcttgaacaatacgtagcactggtgactgaggcaagggtcatttgatctcttttttctctttcttttttttttttttggtttccctttaattttctgaatgagatgactatatgatacaagttatttctttcttacatttatttgggtgacctcagtttttgttcatgcatacaagttctgaaaaagaacatttacttctttttagtgaaccctgttaaaaaaaaccttgagaagtttggcttgagatttgagcagaaaataaattaaaaaatgatctgagttcttaggaaagaaaaagtagccatggctttggtaaaattaaaagtaggccctgtgaaaagccagaaaataattcatttggccattgcagtatagtttatggcaagtggacaggcaactaactgagttaggaaaaagggcatccctaaagatgattttttttttttttgagatggagttttgctcttgttgcccaggctggagtgcaatctcagctcactgcaacctctgcctcctgggttcaagtgatacttctgcttcagcctcctgagtagctgggattacaggcatgctccaccatgcccggctaattttgtatttttagtagagatggggtttctccgtgttggtcaggctggtcacgaacacctgatatcaggtgatccgcccacctcggcctcccaaagtgctgggattacaggcatgagccacggcacccagctgatttttttttttttaaagacaaggtctcactctattgtctaggctggagtacagtggcatgatcagggctcactgtagcttcaacctcctgtgctgaagagatccttccatctcagcctcctgagtagctgggaccacaggtgtgtgccaccacatctggctgatttttttttttgagacagtgtctcactatgttgcccaggctggtctcaaacttctgggctcaagcgatcctcctacccgggcctcccaaagtgctgagattacaggaataaactcccatgcttgctcagattttttaattagaccaaaaaccctgggaatctgtactaatgagtgggacatctgtgactggtgactggatttttccgcaacgataaagggactattacattgagagctgaggtctgaaaatgctgaatagacttggttagtaaatttgatgagtgaaattttattatgaaaatacctgccaagtgttctgtcatgcatttccaaaaaggtatgctactcttcatcttttatgatcacccaaaactgtgatcagtgtagcaacaatgaccagaattctgctgatttgttttatattttggaacatcattgaaaccttcattccgctatctccctcctcccatgatcctcatttctctttcattgccttttgaagcatttgaatgaaaagctgaattccatctttgtgtgctctttcatggcaatgtttttaggagtaggaggagaatctaggtacagagtgtctgcaatagctgagatgtgggcattcctgacatttgacccacggggagcttctctttcttgttgtcagagtcacacagggttgcactaggtttgcctcagttgctttgaatatcttgatttttgtgggtgggaagccaacagaatcttggcaggatagggtgtgaaggccactcttctctaatatgtgccaggtccatagcctcgttaccccagtttccagagaagaaaatgttaggctgtcaggggagtggtttttgagtcaacattatttctatatctccactttctttccttaagagtaattgcactagatcatcagattgtatccattaagcatgtattgctatttacagaaatgggagaccaaatcagattgtgtatgaaactttgattacttttcctctacaacatttccgctggttttgcatgtgttccagagcctagggaacttccctgcagagttcaatgtaagctgatcccaggctggtccatggtgtcatcctttcagacccaagtgcttgatgagctttttatagtcctcctgctgcagatgcctcctccttttgcttccttatgctaaatgaggagagtgaacaatcatcttacaattttctcagcagtcagctttcaggaataaagtcatttttccccctttgtcttgacttctaaagtctaaacttctatgggaaacaacccacggtgataagggtagtaagagtaatgctaggagtagtatgatgtcataggtaaaaattagcctctatcagttatatttcccagaatggaaataaatggcttctacttgtaatttagactgggatcattttagattttatactctttgccagattcattactactcctttaatggtagaaagacttggtttctacttaaaatgtttttcattgaatttgagtataaaaggagtttaaagtccagctaatctctctgtcaccaaaacagaatccttgctgtgatttttctgactgatcataattcacactcccagggccagagagccagttgctttgcatggtggtccgttccatgtgtggatggttttatttgctaaaatgcctttcattacattgactcagagttagccttcctgagattttgaccctttggtcttagttttgctcttcataatgcagttaatccttcttccacataacatcccttgaaaattagaataaattgtaacatctcttagctttgggtgatgtgatgtttttataagctatattctatttatttatcttccttcaagtcattgctaataatgttagataaaacagtatattacttcttcaaggtgatcttggcttaccagtcaactctgtttttacatctttttggctgtttgcatttaaacaaggatgatgaactcacctgtgcaccttggtcttgtaatcattttgctccgcattcttttcttttatatatctgtattcttacattttgggttctgctgattattttgagctttatgttgtcccctggttacctctggtttcctgatgttccctgacttagacactttgggtaactacgtgcccacctacttctctaacagactggtgccctcaatggggaatctgattaggccgttatttagtcatggagtaatattccttagagtgagctttccaactggtgtcctgtagcagtagattacagatgtgctgagaaattgatctctgcagctcttgaagagctgggcagagtctcagtagtctcaggtgtcaggtgcctcagtgtgacattcagatgccattatgtgctccatggtgaccaaagccttaagcactgcatcaaggaatcaacatagagcactggtaagttagtagggcatagggttagatatttgcttaactcaagataaatgatgccgtcatttagtcaaaaaaggaaataaggctttcttggcataacaagttctttgtgaacctatcctgactctcggtaacctcttaggttgaaagaggtgatggtgtgagtgagatgggtgctgtcagtggtgctctgtgtggcgattacccccactggctcacctggggagactgagggcaaattgcctgtattgatcacagtcctctcattcagtgtctgtagcctcaaaaagatgggtggtagtatttcagtcaagtttactgggggctggggcttgatgaagcatcagaacctggaagtatgctgatgtttaacccctgcttatcttgcaggcacaggcaagtgggcaagtgttaggaaaagtgaagtcaacatctggagcactgagaaacctgactgtacaataataaccagctataaaacaattctcagaaaacaattctcatattactctatgagatgtcattgaaaagatgcatttaaaggagaaattaaatattttttttgaactttggctactctatttcaaagtttgtatttagattaaaatgtcatctaatctgtttggtactcttttgttttctagtgaacaatttttgtgtagtgacaagtgttagctatgtttattatgacttttcataacaaaactttgaagcaggaattctcaaatttaaatgagcattggaatcactaggaggtcttgttaaaagttcagatttctggccaggcgcagtggttcacacctgtaatcccagcactttgggaggccgaggtgggtggatcacgaggtcagaagatcgagaccgttctggctaacacagtgaaaccccgtctctactaaaaaaatacaaaaaattagacaggcatggtggcgggcgcctatagtcccagctaccagggaggctgaggcaggagaacggcgtgaacctgggaggtggagctttcagtgagctgagatcgcgccactgcactccatcctgggtgacagagcgagactccatctcaaaaaaaaagttcagatttctgggcttcactctcaaagattttgcataagtaaattggggtggagcctggaagtgttttctaaaagcactccatgtggattcagttggaagtcaacagaagaccaaacgcttaaaagcactggatgtaaaggaccatatgcttttgtactgatcagctggtggatacttagttttgtattgtcaaagggccatttgctttggagacttaggattcttccctagcatgtgtctcttcttgggctgtgttgaaatacagaaacaaccaaccaaatggaattatcacaagcagttttctataactttgtgcaaagttaggccaaacattacatgttgttatggattatgaaattcagaaaacactgcctcctatttgtgtatagctataccattaaacagtattttcacttagtttgtctctgttgatctttataacaatcttgtgtggttagtatttttatttccagtttatgaatgagaaactttaaggttacaagtaaatggtagaagtgttactctaacctttattgttactacttcgaaattaggcaggttttattatgtgccaggcactatgttgtacattctgaaattcattctctctctgaatctttataaaacactgtgaggtaaatgttattattatttttagaattattatgagttttttttttttaacttggctcttgatgaggctaagtaacagtaacttcttgaggtcatgcctttagtcaatggcagagccaagactttagccaggtttgtctgacactggagttcatgctttcactctgggtattgttaaggcagattgcctggcctgattatagtcttctaattagatgtctgtgtcctaagaaggatgagtggtagtgtttctaggcaagttaccagtacacattatacattatagcaggctgccagtatacattatataaagccatgctatacaactcattctagaaagaacagaaagcaacagggagatctaataggaaggaaagcagacattcaaagtataaaaattaaaatgaaatgaaatacaattgtgcatttttagaaaacttgataaaaataggatttcacacgcttcagaagtacaaagagtgggaaaggcataagttgtgatctgcatacattctgataatgttagccattcttcttgaagaagcagtaggattggcctgtgttttataggcttttgagtgttgtttggtgtttcgtttatgggcttatttttccattactaataccagctggcatttgacctttcatgctcatgcctttggcagtatagtctttctaacttcaatgtacagtatggcctttgtgttttaaatcagaaatttattttaatcaaatacatcttgtagtgttgtgctagtgcttttccctcattgacagtaaagtctcattgatgctgtatttactctggatttctttatgcaatttcaaaatgaaaaattttgattctggtggttctggttgtagtccagtgattagtctcaacacaaaagaaataacaaaatgttaattcattttcccctgaagctgactctggactagaagtcaaaacaaaatattttctattaactaatttcatgagaattcaatatgaataaatgacttggcagtatctttttttttaatcccaagttaagcttttctcatgactttatatcatctactactgatggtgatgaaaattcccaggagttaatatgttaccttatcctgatatctttcaattgacatcttgaatgatcagaatgatctttcaatcatttttaaatctctatccactgagatgcatttatcagctgtccatattcatttagcttctaatacttaccaattgcattttaatatcacttgtttctggtagtctaggggaggctgtgtcagaaaggggtagcatgcagaatggcctttcacctaaatggattctatcttgcatggtgacttacttgaaagccatgagtgacggatctgggatatataagtttaggcctatattttgtaagtgattttctttcagagagattccctgaaaatgtcagagcacctgctttttgatagagacagtctatgcagcacttgatggtctagcctgaaatcaaggagtcagagaacaaatatagggtaggggattttttttttttacagagtttcacactgccgcccagcctggagtgcagtggcgtgatctcggctcactgcaacctccacctcctgggttcaaacgattctcctgcctcagcctccctagtagctgggattacaggtgtgtgccaccatgcctgcctaatttttgtgtttttagtagagacgaggtttcaccatgttggccaggctggtcttgtactcctgacctcaggtgatccaccccccttggcctcccatagtgctgagattacaggcatgaaccactgtgcctggcctagggtagggtctttagaagggctttgaagggtgttgtgagccatcaggccagtatcctcatttgagacattttgtgtagttcagctatttattcagttaaaaaaatctccatggaaatgatatgtagaagtctgtggtatttctctcattccatcttatgagttaaaaaaatcaatcctaattctaattttttcttttttttgtatgattggaatcaaaatatgcataacctttgtatctttcagcagaatacaggctggttcttgactttttggtgggctgctggaattacattctaggttctcagactttagggacttaagctgaggcctgggctgaccttgggaatgtgctttgttatacctctgggagtagcactgagcaaagcaggttgggagccaggattccagtacaggcaggaaggagtaaataattaggttagataagaaattatttgccttcctttcagcaggtggacaagctaacaaggaaaacataataaaggaaataaagctcacttaaagagggaaaaggccaataatggaatcacttaaaactttttattgaagaaaatgggattcccttgcactcttgtttgaaatgtgttttggatatgcattgttttatatcagatttggatatagaattatgacattgtccagccataacaactactttgttaattacaactagttagtggatacctgctggtactgcactgtaagtagtaccaacatattctaaatgttcttatataagaactaaaatgttattatgcaagagaaattccctgcttccaaggagttttataatctagcagagagagaacgtgtacatccaacacaagttgagaacacttgcaaagtaacatatcaataagtggaaaaaaaacagtgcaaatggaagtattgagtgattaagagagtgatgccaaagatatggggctggctgaggaaggatctgaattttgaattgggtaacgaaggaggagagaaacaaattggcagacagagatgaggaagaaagatatatgtgaggccataggtttggaagtgaagcaagtcacatttgacatgttagtgacaataagcaagacaacaagcacacaggctaggacaaggcggaacttccatggccgtggataatttgggatgaatttgattattgatttgattcaagggaacagtaggaaaatgccatcgattcttgagtatatgcaatgtgctgaaaatgacagatactggtaattatttaggcagcaacatctatgataggttggagtagtggagctaagggtggagaaagtattagggagctgttttgtaacctagatttaaagtaacgaaggtttagaggagggctttgggaaagtctgctgggttaggaaaaaaaatgagctcagtttttgagatactacttttcagatgtagcaatcatatcctgagatgaccggtcagttactagacaggattacagtttgagagctcaagtcttggccatcgactttggaggcatttgtgcaaggtgatagttcagtaatgcatgtggagtatgtatcatggtggtgactattgagggagaaatgcagaaagctgagtttggaaccttagaagcagctgccagccaagggggtggaggcaggcaaaaagtatagtcagcaaatgagacaaagaggtagtagaagaacacagagaacacccagggaaaccatgcgaggagagaatttcaacagtgctaactgaagcatagaggtcaaggggattgaagacttgagaaagacctattcgacttctcaagggaaaggtctttggagacttagaaaaatttgtttccagtgaagtttcagtgcaaaagtgcatcagggattttctagatactctgcatgacaaggggattaatgtttaataaataaatcccttctgtaattgctttagcacatatgactgggtatctgggttttcaatatttcaagggaaatggtgaggtcactgcagaaaggaattgaggttagatttctcatattatacaaacccatcaggtgatttttatattatgtgggagagaaactctcagagctaaactattgggcctatttagattcacaagatcctagtggctctgggaaaaatctttgggaaaatgtaaaacctgagcagtgttagaaagcctcttctttggtcctgttatttggtttatgttaatgaattagcttggagtatttgtcagagatgttgagttgtggaaaataataaaaatcagattcaaatttaccaaaataattaatatcaatttacatggaagtggaggcaccaaagaattttggtcaagacagaatcaaagctccaaatttaatgacctacagttaacatcatgccaaaagaacagagccattttgtaagaaacaacagtctagttgaataaatggaggtgataagttagatatggtgaagaactcaaattttaaaaggcaagagacactttctcatgactgaagaagagaaatttgtattaggagatatacctaatgctaaatgatgagttaatgggtgcagcacaccagcatggcacatgtatacatatgtaacaaacctgcacgttgtgcacatgtaccctaaaacttaaagtataataataataaaatttaaaaaaagttagttataatgtgggatctgaaataatagtgataagatattcataactgtggccattaaaatccattgacctatagtttttttgttcatgcatgatttttttttttgagacagggtctcactctgccacccaggctggagtgcagtggcaaaatcatagctcactgtagcctggaactcctgggctccagcaatcctctcgtctcagcctcccgattagcaaggactacaggcatacaccaccacagctggctaaatttttgtctgtagtgaaaagggaaaataatgtcttagttttactgtaaaatagtattgccctcataggcaccccaaaagggtcctcagcccacactcctagaattgatgccttaatactatgcaattctcaagttgttattactaataaattaaaaaattaaaattctctttgctgtattttttaaaagagtgaaaatgtactttacaattctatattactttattatcaaattgtgaatgagttattaccaatgttgtagttagaatttcttttcctctcctagtttttatttctgtgggtatagtcggtgtatctatttatggattatgtgagatattttgatacaggcatacaatgcataataatcacatcagcatttatcctttctttgtgttacaaacaatccagtcatactcttttagttattttaaaatgtccaataaattattgttgactataaaaaaaaagaagagaaatttgtagaaagaaaccaaacttctaaatttatcttcgattcaactaattagcagtagtctcaattataaaacctgaatctataatacggtctaacttaggtgtaattagatgaaaatgtagtacttttctggtgagttaaatatgtgatttttgatttataatcacatcacaacaaattggttgagaaagaatgaaggtaaagaaaagattaaattttattttggcctttagctcagttttatgttcagatggtagtttcccagttatagcaaaactgtacttagcccctccttagttctaggaactaagttctaggaagtaaggagggactaagtacagctttggcataattgagggtgtgactttgatgtttctatagattttcatatctctgcaataaaacttaaattgcttatgctgtttctctgatataaaatacagagttttccaatgctctataaaatgtaatttagacagacgaacatgaaactgttcttaaacttggattgcctgggattctgaaatttttctggttatttgttcaaattgatacctgactatgatattcacaacatttcttgattttcccaacagctgctatacaatataggatgtatattgaattgaaataataaataggcgggaaaaaatgagaggaaaaaagataggtacaaacgaaagaggaaagaacaaatgtaaatcatcgaatagttatgatcacatagtgtgagtatgtcttacttttggttttttttgtttttttttttttttttttgagacagtctcactctgtcacccaggctggagtgcagtggtgcgatttcggctcactgcaacctctgccctctgagttcaagtgattctcctgcctcagcctcccaagtagctgggattacaggcacctgccactgcgcccggctaattttttgtatttttagtagagatggggtttcaccatcttggccaggctggtcttgaactcctgaccttgtgatccacccgcttcggcctcccaaagtgctgggattacaggcgtgagccaccgcacccggcctcaattttgtttttaagatttctacctgccaaggcaaaatatgaaacttgactacttacttgattaatacagaccacaacttaaaaacaaatcacttgcttaggagaaacacaagtattatcaacataaaatccagaaggaggctgggtgcggtggctcacgcctgtaatcccagcactttgggaagccgagccaggtggatcacctgaggtcaggagttcgagaccagcctgggcaacatgtgaaacccagtctctactaaaaataccaaaattagctgggtgtggtgatgcacacctgtagtcctagctacttgggaggctgaggcacaagaattgcttaaacccgggaggcggaggttgcaatgagccaagatcacaccactgcactccagcctgggcgactccgtctaaaaaaaaaaaaaaatccagaaagaaataaagaagactttgtataatgcaattaatgacaccttaacaacatcttgattagagaatagtcaagtttcccaaattccactgagctggtttcatgagttggtagactgatggtatcacataaaaagtcctgcaaggtcaattcagtagtggggcttcaggtccagttagataattcttttagaacttaagtttgggataactatttttctttccacctcatgtgttttgaactttcagggcatatattacaacttataacgtatcgctgtcactcttagtctgagcgctcatgttgaaagcacgcactgtgtgagctgtcatctcactgtgaatcagcaggaagggtgagttttcataacatcagtgaaggatgaggtaattattacagaattggtttttggaatacatgataaagaaattctgagaaaaaagtgaaggtcttcagttccctaatggataacaaaggagaacttaacctgacaaaaacgtccaggaagagtttgtatgttcccctaaaaatggaagcatgttagtaacgaccttcaattctttctggaatgagggggaaattccaaaaataaactaaataaaataagcagtaagatttctttgaatttaagggagaagcacattctcccagttaagaaaggtgtcttctgtgaagctgcctagggctacagtcaaacagattccccctgacaggtgtggaacttgtcttcactctgcagaatggcctgttcattgtatttcccttggcatgtgattcaggttgttggagaccttggtaaactcatcatattagatcatgggttgatgtaagttcatgtttggatgttttaaaattggttggaacctggctaggggaagaacgtatgtctacaactggccctgaaagagattaaacatgtttgaaatgttttcttaatggcagtggagtgggtagtaatgtttcttttgctgtgagccagcaagtgtgcctgttaggagagcattcccgaactcatgatgaatcaaagactgattaactgtactttaagtacggcatctggaaattgcttgtgagagagattttgccatcaattacagaagacacatatgtcactggatttaggaccaaagacagggacaaccctttatcaaactgatttctactttactgtgggtcctcttttaatgtaaactttcggacttgctgcttcaaaagtagttggctttcttctgctagtgatatgtaaagaatgaatggtgcccataattgttataaatataatatgcagagttatatttaatttataacataagtcaccagtcaaaaagacagtttagttttttcctatgacaaaaatccaatcttactcagtaaaacaaatgatttacaactcattgcttttctgagactagtatttactgtgctataatttcaggcatttaggtttactgaaggcataaggtatacttttttagatgttaaatttttagatatggttgattgggggaaattaacaatttcaatgtttgaagtggtaaacagctcatttctgcagggagtgataattgggaatgtagatcattggagatggactgaatttaggaacatcatggttgtagatgtggatttaggagctatctgcttagattttgagtcttttcccatgatactctaactcacaggaacggaactgttgctgtatctctctatacttacaaatggtgagggattatctcttgagctgaggggacagattagaccctggagctgcaaaccctaggtgtatatccagcaacccctggactggtactttcattgtgggatgtatacatccttttaaatatcaacagaagaaattttcagaggttttaccttgattttcctaaaagaggaagcaatcatagaactgaattccttttcataattcttcaaaattgattggagaagaaaattgccttttctctcctgccttttcattttgaggaacccttaatgatgtcacttattttaaatcaaagatgcttatttattgcagcatctgctcagtcctccatttcttcctttcctctcctctcctctcctcttcttttctttctttctttttttttacatggagtctcgctctgtcacccaggctggagtgcaatggtgtgatctcggttcactgtaacctctgccttctgggctcaagtgattctcctgcctcagcctccagagtagctgggattatagacgcacaccaccatgcctggctaatttttgtgtttttagtagagacaggggtttcaccatgttggccaggctggtctcgaactcatgtccttacgtgatccaccagccttggcctcccaaagtgctgggattacagtcatgaaccaccgtgcctggcctcagtcctccatttctaaggcattgtatcattcagtggttgtttaataaccttagacaaaatctaaggtttaacaaccactgaatgttacagtggttcaagaatacagtgatacaatggtccaagaattgaaccaactctttttaacctgttttttttttcattttctttctttttataccttatacaaataaaatatgactgtgtttttattttcatagtataaacaatatggaaaataaaaagctatatgatacagagcataaataatggagcagaaagtgaaagtctctcttcaaacatttgccctgagcctactgaagagttattcatctactctcttctctttggatttacacgcatttaaatgtacatgtagaaagatactaacttgtgttttgcaatagataaattgacttgtctcatgtataatgatcaataaactgttaacctgaaaattcactttgtacctcttaatggctggcagcatttctatattaaaagaaacgtggaaaaatagcaaaactctacattcctgaagtttatttttattcagagttgggtgtatttttttgggggggaaccattggtactttttttatacatggtagactaaattataatgttttaaaaatcaaaaggtatttggagagatggaaatatgatttgatgatttctactaactatatgtattgtctccataatattttcttaatttaaaaaagtggttaacttatgtgtgtttggcatatttttgagttgataatctcaaataattcttcacttattacacatacttgaaaatctgctctctcagtttttcaagttaaaagtattctgtccttgtggatctgtcatttcacagacatacctgtttgctttgttggctaggtgatagaaaataaagggcagaacataagaaattatccttcattggatattagttcgttctctcatctggattttaaagtattactggaaaaaaatcctctaatcttctattaaagataagataagttcttacaatgtataggttgtttgtaggactgagaagtattggaaatatgtcttggctcaactagttggccacccttgagagccagtaataccaagtggctaagcttagttgcacccagtggcaagagacattctgaggtttcccatgtattgggaggaggcccaagacaaagaggtccttgtaaaactcagctagagacttggctgtgggacagagtcctagaagaatctacattaactgtgccctgcccagaggcatgctgctacagcctttgtgctgggaaccaccaggatcatggtatgagtttgcgtctccaggtagacactctgagcttcttttgcttactgaccctgttactacccctgagcactgcagctgccgtgtagcatcatacatcttctctgcaaagtcatattacactgagattgttagaaactgtctgtcctttgttttcatgtgtgtggttgttgctgtagaagataattacttatccttacatctagctttctggcttgatacacacacacagacaaacacacacacacacacacacacacacacacacacacacacactctttggcaaaagaaatgaatgtattggtgaatcttttttttttttttttttttgagttagaatctagctctgtcgcccaggctggagtgcagtggcgtaatataggctcattgcaacctccgcctccgaggttcaagtgattctcctgcctcggcctcctgagtagctgggaatacagggatgtgccaccacccctggctaatttttgtatttttagtagagacagggtttcaccatgttgattgggctgatctagaactcctgaccacaagtgatccgcctgcctcagcctcccaaagtgctgggattataggcttgagccaccgtgcccagccagcattggtaaatcttatgtataattttaaaattaaccaatacattcatttcctttggcaaagtataaaaagcataggatttgaatttggaagaccttggttcaagttctgcttctgccacttaatagtactgtgacctttctgaggctctgtttccattttcattccccatcttggttgaggcttgtgagcttcaaatgagataatatatttaaaagcattttgtgaaccataaactgccacacaaatgttgattattgttaatattttatatttagtcttgctggtacaataaaaagttagtaataaatgccccatgagctgtcttaattccagagaagacatatgaactaatatacccagcttgggtcatcaaaaggtatatttatataagggttactgctaagcagtgacaatcacgggtgtgctaatttcatcctgggatctgcaagcagccttaggtggagaaaagaggaggcacagaacagagataaataaaggcttagtttctacacagccttgtgaaagactgtgttttaagggttgagttcaaccattaaggttgatggtgttttatagtacttattgatgcttaaaagtaaaatttatcaatttttaaaagaatagttttatgagtcaccaaatttataaatatggtcaaatgtgtattccacacttttcagagaaattatgtagctcttctggtaacagtgagagtcctttgcttacacagtcaacaacataggaaaagagattcagttttcctatggcaagtttcacatcctggaaaatgttttatcagttggatgctggggccatctctaggttagaaagtgtcaatgggaagtagttcaggttcagatatgggtaggatctgtgcttcctagtttggagaagggtttctgatgatgagttgggatttggttttcattcttctggcctcgtagatgagtggccagtttcatttcattgattggctctatcttcagtttatgtgctcattctttccattggaaactcctttaactcttctgctgaaaatgttctctagggttcaactttagggaaatcttagcaaattttatttattactctagctattatgtttattttcataacagcttttctgaaggaggacatctaacacatctaggtgttcataatgtgagcctcatttgtattttcagagaaaagttttatcttgagtttgaatgaactgtggaattagctgagttaagagactctcatttttgctatccatgaggcagaaaagtggtgtgaaggatatatgacttcagccaattgactactgaccagtctttctattgtttaggccataggaaatagggcatttggagacaggtgctaaggaaatgagtagcacttttgtgtgtgtgtggttgtaggaaccactgtacaccctagaacactttattaagaccttactgcttatgtaattgaaaagacattgattgagctacaggtacctggtcagacattgagagacctgtacttggtctcaggatgctctgtgtagagcttccccaggctgttgggagctgggagactgcttggcctggacaggacccagaataagaagcatggtacctcctataagcctccgagtaggctgtgggcttcaagatggctctcaggatgatcagagaggtcaggagtgtaggcttaagccagggcccagggccaatattctctgagatgagtcaagccccaaccctctctggggtttccagaacaaaggcttgatttggggagccagcgttgtggagagggcagggggcatgtctctaggcattgctggaactgagggagattgtcagagtggctggggtaatgtttgtataatccgtggcagttggtccttcctgcatgagagtgggaggttgaatgtcccttatgggagagtcatacaccagggctgggctggagcagccagccagagggcgttggggcagtggctctgctggggtgaccaaagtagggaaggaaagccacttgttgcgcacaccccattttgattaactgctttcatgcaggatgaggcagggataggatcatttctcaggcccaggtattgatgttttcttaattctttagtctggaagaacttgatgagagggcaggaggatgttaagaatttccttaatcaaacccatttttcatgtctcctagggctaccccttcatctgcacatctgcagagaataacctgactcctctcacttctccagcttttctcacaaggcagttgttactggactgctgagggaagtggaagggaagcctgggagggggctctgatggtggcacccaatatacagggtctggagtcagggtgaaggaggtcagggactagcgtctgccatagcacgggcacacggccaggctaatgatgagcagcatggccaggaagaaggtggctgtgagctgcagccacagcaggactgctgagagcacggcattgaccaccagtgagcaggacacaacgaagaggcatgggatgctgctgctgtgcttcatgacagcggacatgacaggagcagtccatttagccctgcctcagcaccacaagttctgcccatgctgacaagccttccaggaggcctgggccggggccactagcggcatgcagatctagattcaggagcacaccaaaggtgtagaggaagacattctgaagtgccaggggcagctgccgtctcttcatgagcagctctgtatgcagtgacgacaggcttgagatgaggcagtccaggatgaggagcagcaggcccagcggagtgatatgtaggggcatggggctggcagcagcttctggagggggcctgggaagggtgtttcgaaggtcttacaggccatctggtggatagcagacccccgcagccatctgcagcagcagtgcaaacccctgaggtgcagagaagcagtgctggaggcagagacagtggaacagggcccgcttccaatcttgagattgctcagcacgtggtaggtgctggggtccatgtcacactgaagatagatcaccaggttgttgttagtgccatagatcagggctgatcatgtgaagggagcagcttagtgccagagtgggggccccctacagccatgcttgccagcccactagaagggagaaggtgcttaacagtagcttggtcaactcagctccacagctgaggagggctggaaggacacctggctgtccacatggcacagtgccagcatgggggatgggcaccacacgtggcagtagataggagcagcatcaaggtccattacactcatacccacaccagaccttgggtggctggtgtagttagcaaggggagtgggattgcaacatatttacgggaaatcaagttatggagccacctcccagtagggaggagccgtggaacattgccagagaggatactgaggatcagagtcatctgccaactccatagtcagggcttgaagagtaagggactggtggcccttgaagccacagtcttggggccagtctgacggagttaggagagggaagaaggaatctagggtgcaggctgacaaggtgctgtgcacactctgcaggaagggaggcaaggataaaggcggcatgaaagttggagaaaaaatggatgacagccagggaatccagatagtagtgtctctacctgcaggccccagctccttattctgcctccctcatagcatctagagctattcgggctcttgcatagtgactgcaaatagtcagtctttcaatgtcatctccatgttgggcacagcatagcctgagctgcacagattgccagcgcaggtgccccttgcaaagcccaatacagctgatgtcttcagtttggccaccacagccagccaggaatcccttgaggaatggggaggacaatagcgagccatcccagccacctctgctgttgactttgtcttccatgtgccgctgcaggcaatccagctggttctcgagaaatgccaggtccttaagcttaggcagagaatccttgtcatctgtcatcttccccaccaaacttctgaagagcactttctataagtcaaaagtaaggcagtcttagttttattctctatatttgatgtttggtgcactgcaaaagatggcatagcttagtaggatgttattttatttcagttgcaagataggaagggcattgataattgtagaaatggggaggggttacatatatgagtctgaggctgtatatttagtcttctgagctttggaaatagagatgattttttttcagtcttagcaaaggaagtattttaaaatttcagaaacaatcaggctattaataaagtatgtttaagtggtagagagagcaatgcactaagaataatgattttttaaaaatcttgattctgctagtaacttgctgagcctggacaagtcccttaatgtttctgaacctctgtcttcttacttataaaatgatatttctatataacttaaaaggtcccttccagacctaaaattctgtgactctgatttttctctatgctcataatgattctttgcttacttccacagagtatgaaggtaacaggtatcccttatcaatgaaaattacctttaaaagtataaagcagcaaactgtgttgcaaagggaaggtatggaaatgagctgtgaatcttgaacctaatggggttgcctgtagctcattctctttgatgtgcgctacctgcagtgttcactcctggtgtgctgtgattctggaagagaggcactaggtcttgaatgtgtagtttttgacagcctgtttctagatgggacacacatctagacacacatcatttcaatggtgaccttcaagggcaatgatgccccagccttcaatgtgtaactcttaggtaacactaaaattggaacttggcaatcatataggaaaagaggataatgtcatgttaggcctaaatagggtattttggggatggaaaacatcaaagtctatactctacccaagtatagattttggtaaatggattttagacagattgtttttcaagctccgttatgtctccttagactttttcactttttgtagtaatcacttttttctgatgtttacaatattctgttataaatggggcttaccatctgccattaaggaaagtataaaaatcaggctgtgccagtctttttctctccataaagtaatttccatcagacctcattttcctctgctttagtctcttctgcgaatgtggtagtgatcttaagttatatagcttgtaaggtgaggcacattacagatacaaatctgaggatttagctgggcaagggagggagagaaatggtaagaagggaggtagaggagtttattgattactcatgtaatgcttcattgtgagtaaagaaaagcagattggtcatctataataaaatgtagcccaaatggcatttgcacagttgtaaggtttatttcacagcaaatcagtatgcctattagcatttcacacatatccctgtctctctgtcaagaatgtttgcagattctttgttgttcatgcttaaaggcactttttatcttctgttgtcttgctaatggacctcctcttgaaaaacaactcttcctgtctacacagatgaatctcttcatgactactgtgtttcagtttttgattagctccttgggaatcacagtttctgttaggatgagcagaaagaataagatgggaggccgtaatttaacattgtaattcaggatcaaaatcataggcttttgtgtgactttgaagtcttcctgctccttctaaacagaattgcagctatagcatcccagctaggtgtttttcacatctctttttcttcccttcgtcttcttcttttacttccctttcttcttcccctccctcccttttttccttttttccctcccttcctccctccctccgtccttcctttcttctctgtatttaagtacttgcaataaaaacactgacacttgcctgcatcttgaaaaccccagattcagtttcatcaacatctgttgaatgcctattatattcttgattctgtcctaggcctattcctatgcattgtcttatttaatccccataacaattacttgaaaaagctatttcattcccattccatcgatgaagaaactttggcctgattcatagagctagtatgtggcagaggctgaatgtgaaattacatcttctgaattcttcctttactgggtagaaactctgtttcatatgggaagttgtattagggttctccagagaaacagaaccaagagggtatatggagatatacatgtgcgtatatatatttattataggaattggctgttgtaattatggaggctgaaaagtcccacagtctgctgtctgcaagcttgagaccagggaaagccagtggtgtaattcattctgaatccaaaagcctgagaattggggggccaatgtcctggtgtgagtctgaaagcccaagaaccaggagtgctgatgtctgagagcaggagaagatgaatgccccagcttaaacacaaaggtgaattcacctttccgccatctttttgtttgattttgtccctcaccaaattggatgatgtccaagcacattggttgggcaaccttctttactcagtctactgattcaaatgctgatctcgttcagaagaggcaaacctagaaataatgttttaccagctgtctgggcattccttagcccagtcaagttgacacataaaattaattgtcacataattgctgttataaaaggaactataccttagtgtggaagtaagccagctatgattaagtgagaacatgtgaccaaattctgggtccagattctcaatgactgattcagccttgggcaaggttttgacctttgtattttagaatctctactgattaaaaagagatagtaaaagttgtcttagaggagtcttaatctatagctgtctgtatttactgaaaaaccttacttttacaaaattttaattttgtggacaacttggaactctttagttgggaaataaattccagcatagttgttttaatagcactgcaattaatagaagttatattatctaaatcaattgttaacaaatatgctcagttactgggcagaatcttatttgatgggaatatcaatacatatttgttgaatacctactatgtgactgacaccttacattcatgagcttatttaacccttatcatttctgtgagttctcaattacttgcctcaaagaatgaggctcagaggaattaaataatttttccaaggtcacataactagtaggtggtgaagttgggatttggatctttgaatgcacaaaaatagcacaattattactagtgtgggattttcagttagatttaagttccagttctgtctcttactagcagtgtaacctttggtgattgacttaatctatctaaaccttcatttttagattgagctacttaagaggtctgttccattctaaagattcaattgcaactgtccctttagcatggcctgacacagtgagtgaggtatgcaatggcacctgtttataagggtttagcatgttaaatgaaagatgaagcataaagatgaaatgtgagcatttttttcataatgtatgctaaaatgttaaatcatgcagttttagcaaaagatactagtgtgatgcatgtgttatattagacagaactttggagtagagctgggatatgcaaaacctttccccatctttaccactagcacactgtgaatctcagagcatattatttcacttccgtgtcctctgtgtttcatctgttcatgcattcataaaacatctacagagagacagcagtgtgtccaggcacactgtacgaggaatctaggaactggaaaaggagctaacacgtggcgtctattcccgcatgggccaaggaacttatagcctaatgggaggagagacagacatatgaagattttataatgcagtgtgaaaagtggtattacagtgttcagagccaggggaggttttatggaagagctgacaattgaagaagcaatgaagatgagaaggcactctgccttatttatctttatagtaatatttcctaaagcattgagtgcagtgtccaacacatagtaggcactcagtagtgaattggatactgatttgcaagctggacttgttttcaacaaccattccttcctatgtttcttgttatagctcctctacctctttagggagctccacagggactcagttcaagtccctaattctcttagtgacagtacaccagggtggttaagagcataggttctgaagtcagacttcctggtttcagtttctgtctttgctatttgttagctgtctgaccttgagcagttagttagctttctgtgcctctgttttcttgtctataaaatgggataataggctgggcgcggtggctcacacctgtaatcccagcactttgggaggctgaggcgggtggatcatgaggtcaagagattgagaccatcctggccaacatggtgaaaccctgtctctactaaaaatacaaaaattagccagacgtggtggtgcttgcacctgtagtcccagctactcaggaggctgaggcaggataattgcttgaacccaggaggcgggggttgcagtgagctgagattgcgccactgcactccagtttggcaacagagtgagactccgtctcaaaaaaaaaaatcataataatacctagcattattaaatggaaaaaattaaatgcaaagaactttgaatttgaatggagactaagcactaaggatagtaattgcataatgaaagttagcaatttttatttttcattttgatacattttatgctgagttcatttattagagtgccacttcacaaataactcagttacctgcaaaaatagaatttttctgattgacagtgatcaaaaagaaaaggtgacttattttaggaaagatgttgctttttcttcgcctgctcttgctttaaagaatggatcataaggttctggttaatgtcataaggagctcacatgtattttgctaattataagtcatgcttctcagtgacccttttaactgttaaaatgacctccagattctgatttttcttcactctttattaatggttaacaaactgtttaatgcgcggtaggaaagccaagtaagcctgaagcatttagaaaatggcatgtgaattagttgtaaactgtttcagtaaacattaaatgggtggcaattacttaaagtgattgcctaagtttcattaaagtatttaaaagaaaaaatatgtgcttaatgctgccttaattataaggaacttactacagtagcttccatctagggtttaccaaattagcctaattcataacctcacccagggcattgtatgcacatgcattttatacacatttctgatttcccccttcaccccatgcctcactgagactcagacctggtaatctgtgtttttaattatttaaggtgaatcgctgatgagacctggttggaaaacacaggtgttgtctggttaaaagcttggttttgattttgcattcaacaattcaaaaagctcttaaagatacttcagtataactggttaccaagggttaattgtggtgaatatagaatgagagtagctgaggaaatggaagtctgtgatttttgattgccttgttaaatcgtcaacagcagcagcaccaccatcattgattgggttatggcaggaaatgctatagttagatttgctacaaattagtttagatagagagtatgggtgaaaataaggtaatcttttcagatgttgtctgataaatggaagcagtgcattcatgagcagagctgcaaaataaatgttgagtacacctttgaaacaaggttgcctaccgtgaattatagcaaacaaacggaagtattctcaaggtgtgtggaatcaataaaaaccaaagtgtcaagatgcaaagagcagtcagcttgtataggtgcccacaactactaatcataacttgataggtgtggaaagaactgctgaataccctccctcttacactgccccaactatggcactgccctagatagccttctaaaacacacacctgattctgccactccctgcttgcagccctcaatacttttctattcatatgataggataaagtctaaatgccttatcaaagtatatagggccattcaggatttatctactatatactcttatagtcttctttctcttctcttgccacattttcatgttatatgctcaagccaactgaagtctatacttgtaggcttccgaagtgctttgagaaaaaaaatcatataccacattgttctgttatagaccctaacacagtgcctagtaggggctcaatatacatagtagttgtttaataaatgtttattgacaaatgaataaatcaaaacacaattactgtaatgatctcattacatgtggatttttcccttttgggatataagcccatccagagcactatagtgtgcacagttactggcacataatagtcattaagagtttatggagatctggcaaaatggccaaataggaagagctccagtctgtagctcccagcgagaccaatgcagaaggcgggtgattgctgcatttccaactgaggtagccagttcatctcactgggactggttagacagggggtgcagcccatggagggtgagcagaagcagagggggttgtcgcctcacccaggaagtgcaaggggccgggggactccctcccctagccaaggaaagccgtgagggactgtgctatctggcccagatactacgcttctcccatggtttttgcaatccgcagaccaggagattcccttgtgtgcctacaccaccagggctctgggtttcaagcacaaaactgggctgctgtttggatagatgccaggctagctgcacgtgtgtttttttcgtaccccagtagttcctggaaccccagtggtgcctaggaaccccagtgagacaaaaccgttttctcccctagaaagggggctgaagccagggagccaagtgatctcctgcagtggatcctactcccacagagcccagcaagctaagaaccactggcttgaaattcttgctgccagcacagcagtctgaagtcgacctgggacgctcaagcttggtggaggcaggggcatccaccattactgaggcttgagtaggtggctttcccctgaccatgctaaggactggacgtaactcaacacagcacagcaaagtggctgtggctagactgcctttctagattcctcttcactgggcagggcatctctgaaagaaaggcaagagccccagtcaggggcttataaataaaactcccatctccctagggcagagcacctgggagaaggggtggctgtgggtgcagcttcagtggacttaaacattcctgcctgccggctctgaagagaccagtggatcctgacaaggagggttctcccagcgtggtacttgagctctgctaagggacagactgcctcctcacgtgggtccctgacctgcatgcctcctgactgagagagacctcccaacaggggttgacagacacctcatacaggaggaaggagcaggcaggaatctttgctgttctgcagactccgctggtgataccaggcaaatagggtctggaatggacctccagcaaactccagcagacctagaggagaggggcctggctgttggaatgaaaactaacaaaacaagaagcaataacgtcaacatcaacaaaaaggacccccacacacagaaaccccatccaaatgtcatcagtctcaaggatcaaaggcagataaatccatgaagatgaggaaaaaccagcgcaaaaatgctgaaaattcccaaaaccagaatgcctcttctccttcaaatgatcgcaactcctttccagcaagggcacaaaatgggacaccgaatgagtttgatgaattgacagaagtaggcttcagaaagtgggtaataataaacccctctgagctaaagaagcatgttctaacccaatgcaaggactctaagaaccttgacaaaaggttacaggaactactaactagaataaccagtttagagaagaacataaatgacctgatggatctgagaaacacagcacgagaacttcgtgaagcatatacaagtatccatagccaaatcaatcaagcagaagaaaggatatcagagattgaagatgaacttaatgaaataaagcatgaagacaagattagagaaaaaagaatgaaaaggaatgaacaaaacctccaagaaatatgggactctgtgaaaagaccaaacctatgattgattggggtccctgaaagtgatggggagaatggaaccaaattggaaaacatacttaaggatattatccaggagaacctccccaacctagcaagacagaccaacattcaaattcaggaaatacaaagaacactactaagatactcttcaagaagagcaaccccaagacacataattgtcagattctctaagcttgaaatgaaggaaaaaagaatgttaaagggcagccagagagaaaggtctggttacctacaaaaggaaacctatcagactaacagcagatctctctgcagaaaccctacaagccagaagagagtggggcccaatattcaatagttttaaagaaaagaattttcaacccagaatttcatatccagccaaactaagtttcataagcaaaggagaaataaaatcctttgcataaatgctgagggattttgtcaccaccaggcctgccttacaggagctcctgaagaaagcactaaatatggaaaagaaaaatcggtactagccactgcaaaaacacaccaaaatatagagaccagggacactatgaagaaactgcattaactaatgtgcaaaataaccagctagcatcatgatgacaagatcaaattcacacataacaatattaaccttaaatgtaaatgggctaagtgccccaaaaggcacagactgccaaattggataaagagtcaagacccattggtgtgctatattcaggagacccatctcatgtgcaaagacacacatacgctcaaaataaagggatggaggaatatttaccaagcaaatggaaagcaaaaaacaaacaaacaacaaaacttaggggttgcaatcgtagtctctgataaaacaggctttaagccaaaaaagatcaaaaaagacaaagaagggcattacataatggtaaagggatcaatgcaacaagaagagctaactatcctaaatatatatgcacccaatacaggagcacccagatttataaaacaagttcttagagacttacaaagagacttagactcccacacagtaatagtgggagactttaacaccccactgtcaatattagacagatcaacgagacagaaaattaacaaggatattcacaacttgaactcagctatggaccaagcagacctaatagacatctacaaaactctccaccccaaattaacagaatatacattcttctgagcaccacgtagcacttactctaaaatcgatcacataattggaagtaaaacactccttagcaaatgcaaaagaatggaaatcataacagtctctcagaccacagtgcaatcaaattagaactcaggatgaagaaactcactcaaaaccatgtatgtggaaactgaacaacctgctcctgaatgactacttgggtaaataacgaaattaaggcagaagtaaagttctttgaaacctatgagaacaaagacaaaacatactggaatctctgggacacagctaaagcagtgtttagagggaaatttatagcactcaatgcccaaaggagaaagcgggaaagatctaaaattgataccctaacatcacaattaaaagaactagagaagcgagagcaaacaaatttaaaagctagcagaagaaaagaaataactaagatcagagcagaactgccctcactcagcaatgaggagcctgagcaaatgtgcaaggctgtgagagagagagagagagagagagagagagagagagagagagagaaggagatagagacacgaaaaacccttcaaaaaatcaatgattgcgggagctggttttttgaaaagattaacaaaatacattgactgctagccagaccaataaagaagaaaagagagaagaatcaaatagacacaataaaaattgataaaggggatatcaccactgatctcacagaaataccaactaccatcagagaatactataaacacctctagcaaataaactagaaaatctagaagaaatggataaattcctggacatgtacagcctcctaagattaaatcagggagaagttgagtccctgaatagaccaataacaagttctgaaattggaggcagtaattaatagcctgcaaaccaaaaaaagcccaggacctgacggattcacagctgaattctaccagaggtacaaagaggagctggtaccattccttctgaaattattacaaacaatagaagaagagggactcctccctaactcattttataaggccagcatcatcctgattcgaaaacctggcagagacacaacaagaaaagaaaatttcaggccaatatccctgatgaacattgaggtgaaaatcctcagtaaaatactggcaaaccaaatcaagcagcacatcaaaaagctcatccaccatgatcaagttggcttcatccctgggatgcaaggctggttcaacatatgcaaatcaatgaatgtaatccatcacataaacagaaccaatgacaaaaaccacatgattatctcaatagatgcagaaaaggcctttgaaaaaattcaacaccccttcatactaaaaactctcaataaagtaggtatcgatgggacatatttcaaaataatgagagctatttatgataaacccatagccagtatcatactgaatgggcaaaagctggaagcattccctttgaaaactggcacaagacaaggatgccctctctcaccactcctattcaacatagtattggaatttctggccagggcaatcaggcaagagaaggaaataaagggtattcaattcaaataggaaaagaggaagtcaaattgtctctgtttgcagatgacatgattgtgtatttagaaaaccccatggtctcagcccaaaaactccttaagctgataaggaacttcagcaaagtctcaggatacaaaatcaatgtgcaaaaatcacaagcattcccatacaccaaaaatagacaaacagagagtcaaatcatgagtgaactttcattcacaattgctacaaagagaataaaataccgaggaatacaacttacaagggacatgaaggacctcttcgaggagaactacaaaccactgctcaaggaaataagagaggacagaaacaaatggaacaacattccatgctcatggatacaagaatcaatatcgtgaaaatggccatatggcccagagtaatttatagattcagtgctatccacatcaagccaccactgactttcttcacagaattagaaaaaaactactttaaattccatatggaaccaaaaaagcccacatagccaagacaatcccaagcaaaaagaacaaagctggaggcatcatgctacctgacttcaaactacaaggctacagtaaccaaaacagcatgttactgataccaaaacagatatatagaccaatggaacagaacagaggcctcagaaataacaccacgtatctacagccatctgatctttgagactgtacaaaaacaagcaatggggaaaggattccctatttaataaacggtgctgggaaaactggctagccatatgaagaaaacagaaactgcaccccttccttacaccttatacaaaaattaactcagatggattaaagacttaaatgtaaaacctaaaactgtaaaaaccccagaagaaaacctagggaataccattcaggacataggcatgggcaaagatttcatgagtaaaacactaaaagcaattgcaacaaaagccaaaattgataaatgggatctaattaaactaaagagcttctgcacagcaaaagaaattatcaccagagtgaacaggcatcctacagaatgggagaaaatttttgcaatctatccatctgacaaaggtctaatttccagaatctacaaggaacttaaacaaatttacaagaaaaaaaaaccaacaaccccatcaaaaagtgggcaaaggatatgaacagacacttctcaaaagaaggcatttatgtggccaagaaacatataaaaaaagctcatcatcactggtcattagagaaatgcaaatcaaaatcacaatgagataccatctcatgccagttagaatggtgatcactaaaaagtctggaaacaacagatgctaatgaggatgtggagaattaggaatgcttttacactgttggtggagtgtaaattagttccactgtggaagatggtgtggcgattcctcaaggatctagaaccagaaataacatttgacccagcaatcccattactgggtatatacccaaaggattataaaacattgtactataaagacacatgcacacgtatgtttattgcagtactgtttacaatagcaacaacttggaaccaacccaaatgaccatcagtgattgactggatatagaaaatgtggcacatatacagcatggaatactgtgcagccataaaaaagaatgagttcatgtcctttgcagagacatggatgaagctggaaaccatcatcctcagcaaactaacaggggaacagaagacccaacactgcatattttcactcgtaagtgggagttgaataatgataacacatggatgcagggagtggaacaacacacactggggcctttcggggagtggggtgcaaggggagggagagcattaggacaaattcctaatgcatgtggggcttaaaaccaaatgacgggttgacaggtgcagcaaaccaccatggcacatgtatacctatgtaacaaacctgatgttcagcacatgtatcccagaacttaaagtaaaataaaataaaataaacagtttgtgaatttatcaataacctgatagaattacagactgcagtgcgtactcataaggaactcttatttattcatgctgttgaagggagattggataagctagacatattaaataatagtatgtttgattttcttggagtttataaagttatcaagctgaacagtaactatctgaatcttgagagactggaaatttggctgacttcttttaggtttcttcctttcccacagaattctttgtttctccctctattctgtgccaattggtatcagacctaaaactgatgcagaccctgtggatttaggcagagctgacctgtccagagttactctcctaatagtttacagcccacctaggtttagaagacagttgttttgaactatataattactttggcttgagttggattctctaggaaaacaaaaaatagacaaaagacattgaatagtgattacagtttttaatcatagttttattatgataagaaactgaaaggatgcaaaagagttggtcatacttacctggattcaggtcaagccattgccaagccatggtacaggcactgatgtggacctttttcaatagaggcagagaagacttaattttcagactgggctctaagtacttctggggttgagtacagtataaatatatttacctgaaacatcccttttatttgggtatttggaaagagtatttttataataaggtaaacctagaactattaattttaaatatgaaatgtgaaagtctttaaagacaaagtatggaggtttacagagatattttgaggctgggtggatgccttagttattctgtctgattaaagtgttgaagaacacacacattatactaaagtattggtttgtaacatggaagatttaatgaccatagcatagacattaagtctttgttttttgagttaatcactgagggaaactgaagttccatttcaccacttcctgggtagtgacagtggtacaatctttagcttcactttgttgcataagaaaccagttaggatccaaagctgcaaagaaagatgcatttctgcctttaagaacaagtttaaatcatgaactgctttatttagagccagttggaggtagcatactgctggcaattccaaaccatttaaaaaacaaaagttatggttattaatttttgaagccacaaaagcatgaatcaacattatagcagtgtcagtatctcagtaggaactagtttcaactgaactgtggcagcaaaataaatgtttgcagattgttttgacaaaatgtcatcctctgggcttcaatttatttgccaacagccttacttttgaaaaagtcttgctgcgcttgaagtttagaagaaaaccctccctctgaacattctggaccttaacaaataactctatctgcaagcatttgtaatgtggatctgcaaatgttttaataggaatggaatatgttgctaagagatgtgtctgtaaacatctgtttgacatatttcaccatggtggagattagggatccctggtacccctggtggtacaggccgtttttttaaaaacagaattcacatgtggtttttgaaaattacttatttatttattatgatttttaaaaatttaatttaaagttccagatacatgtgccaaatgcgcaagtttgttacacaagtaaatgtgtgccatagtagtttgctgcacctatcaacccatcacgtaggtattaagccctgcatgtattagctatttatcttgatgctctccctcccctcacctccacagtccccagtgtgtgttgtttccttccctgtgttccacatgttctcattgttcagctccttcttataagtgagaacatgcggtgtttggttttctgttcctgcgttagtttgctgaggataatggctttgagctccatccatgtccctgcaaaggacatgatctcattctatgaatttttttaaagagatagaatcttgctgtatttctcaggctggacttgaactcctgagctcaagcagtcctccagcctcagccactcaagtaacaggctacaggcgtgcaccagtatgtcaggctcacatgtgtttataaagttctctagacagggctgtaacagggttgtgtgtgtgtgcgtgtgtgtgtgtgtgtgtgtgtgtgtgtgtgtactgtcagatgattttattcgtatttttctagtgttcacccatcatttgaagcttaggcacatgcaactctaggaggtgagtttagtccctgaaatgagtatcttttttgaaagttgcttgacaagtgtgaagaaaatcattttccaaagcattaacgtcaattttatacaaaattctgcctgcgtgtgtttatatgcatttcatctgactcttaaacagatctataactcccaaagttagaactgacaaatttataggctaagttgtttgagctctggaatgaatttagatagttcttaaagccatttaaaatcagaagaaaataaattaaaaggaatagaagggatggcttgttgaaaagtaaaggaataatggctcaatcccaagcttagtgtaggaaaagtttaatactcattgcaaagtatttggtaatatatagtccttggatattttaaaaagaaaaacaagcattgttattatcaagattttaacatgcctcattttcaaagagttcaaaccaatggctagatatgtttttgaaatctcctgtttggacagtgggatttagaagggtgccctatgttcacaaatacagtagaaatagaaatgatgggggaagcacactatagcaggaagagtacggactttatggtcagacaaagctacataactgctaagtctagatctccccactactagatatgtgatctgggtaatgtatgcaataacctcattgaatacatatcatatatgaatatagaaataatacttaggttatgggaatgttctgaggattaaaggagatatgttcataataagcgctatttattaatagatgttcttattaagtaatatttctaatctagtgtccttaccaaattgcttggccaggaaaaaatagaaagcaagctgtgaagaatctcttcaataaacctcataactgtcttttgaagaggtcttgcaagtggtgatgaattgaaagaataaaaataaaacttgtgataatggaaaatagaagtataagttttggaagaaaagactgcagtggatgtgtagctcagtttgtacacaccccaaataacattggaaagccaagttattgttctcaaagtctttgctcattttaaatagtaatagattcaagatagaggagaaactgatttctgaagtgagcttgatttcagcatgtaaaaggatacattcttttgacttagttcagaacatgctaatttcataggcaaattaaccaattgtcattcacggcaggacataccatgcagacatttcagaacaattttaattgcagttgacatttttgaaatgaattcttggacataaacatctatatgacatggatgtgtcactgtaggagaaaatttagtgttagctgatttaatagctaaagaatacattttaatatttaggcatattttatattagtgaccaaagaaaaaaaccaattagaaattgactttcagaattctgtttagggaattcatttagctgacatcacaagtaactcttaaatagcccctttggtgtgttttaaagtaggattaggtgaatataacattacaagaactaggcattggccagcttttctttgagtatacaagacagaagtttagagtttacttaactataatttatttttatgtaaaccagtaatggagtctgtaaaaatatttaggttcttgttctgaaaaattaagtttttttttttttttttaaggaacatggttaatggctgatttacatgtgttattttgacatgagttttgttctattgtagtagagaattagacttcctaacatctccactatgcaagagtagagagtggctggacatatcttaggctataacaatcttaatatgtgtgtgttttgggtgcagctcagagataaccaatgttgtttaatattcattggtgtctcttggattgctgattctgttttgtttttaagtcagattactacttaaagaggaaaacttaaatggatatcaataggatctgtgaatcaaaacttgttctgtacataaaacatctagattcatttcagtaagttacccttgtgcatagcttagttcctttcaccacatattctttttatctgtgaaccatcgtgcatatttttccttttcattctgtctttggaaatcctcattctattcatgtgctttatttttccattggattttcaggtttacttaggtctctggagttggttatatgcctttacctctttaggtcactttcactgaggtttatctatcttggccacgattgattggaaattcattgaaaaattcattcattatgcaacttctttaggtagttgttatttaaatactgctagttagtgctcactacacatctttgactaaataacagggtaaataaagggtgagaatatttcttggcattattttttccctctaagaatgtcagattcagttttttcaatctttgtattgaaaatttgttggtattacttctcaaagaaaagatgagatcaaaagtgccagaatcaataatacatcagtagattgcttaatataatagcattatctggtctttctgaatataattttataagccagaatcgcaaaatttgattcctccagccatggatgtacctttagtattctcttcactcttcctgttgttattatatgtcaaaaagttggggaagctgagtcagagggagaaggagggatttgctctgtcagaattgaagctgagcaccagattctggtcttataattcggatcccatcactccacctgtgattactgttgactcagggctgtattatctcatgaagtgagttccctgtgctgccactagataggagtgcatttgcagaatcccatcttttgaaatgaatgtgacgaagatccattttctctgaggatataggaatcagctgctgcaaacacttcattgattacttgggggaaggattggagggtctttagtatcttatgtgaattctcctaaaacttattgggaacaatcccttccccttccacaccacttgcaagcaacagcacttctttaattcattttcatattactagacaacttaggtattcatatttaatatctgccttgagctttaggttctttgactcctacatatcaacactgggttgcttttatctcagcttaccctagcttttcagtcttaaattgacagcgtgacctcaagtcttccttctggtcccttcagatttgctgttgaaatttgctgctctggcatttgcactgtggcctcctcttgtggattttggcttatctcgttcatcaggcccagagcaccttccactgcatttgtaggagttccctgactcattctttatacatttctataactgaatctcagacaccccactttgctgaagatttttcctgcccttctcacgaaagagaggtggcagagggatttggacaattttcaggtgaatgcgtaatctctactttacaaggttgctaaagcgttttaccagtgtaattctaagaaagccagatttgagcttatgcaggtcttaaagagtgtcataaatagtcaaaagtgtttccaaactagcttaagctggtacttgatggatctaaacaaggggttgtctgagaaggcaaaggaatctaagttttatgatcgatagttaattaattggaaattcttcacccagttaaggaatagccaagccttacacgttaccccaagccttagaagtgactaaatactttctctaacagttctttctgaacaggatgctgttaataatcaatctcttttgaaatggcacttacttatctcgccactgatgaactgaggttatctctagatgccttgaagtgttatatataggcttctaatataagggattaagaaatgttgtagagatagaatatagtgaaagcggattgtgtcaaagggggtgaattctttacttttgtcagtattactctgtagaatgcataagtttatttgtagcacacttcaatagaaaattaatatccttagccagcccacatacccactctaatctaggttttctatcagctttgtgtagttaagtgatatgaataatttagaaggaagtttatttctataacaaattatgaacctctgcgttaaaagttggtcctaaaaacttagctgattcaattttattatttactgagaatggatttagcatatctctgttggtcatttgggaaggtgcttaatgaggaaaagcatcaacatttacttgtgtttatatttagactcttgtcattcatatgccatttctcaagcagtcgaactcagtttctacaagtggtctttcagcttctggcctggtttttaggtctttgctgattagtagacatatgttgctggtgtgctgctgtgtgctgctaccacagaataccacagacttggtaatttgtaaagatcagacatttattggctcacccccagttctggagggtgagaaatccaccatcaaggttctggcatctggggagggcctgcttggagtgtcataatatggcagaaggcatcacaaagcagaggggcaaagaaggcaaaagagagcaagagggggtgaatccattccccagataatgtattagtatattcctgggggcagaaccctcatgacataaacacctcttcaaggtttgacctcccaatcctaccacgatggcaattaaatttccactgagttttggatggaaaaaacttctaaaccatagcacaaggcaaatgaagcattatgttgtctgagaacagtgaaactatagatgtcaagtaggaagtgttggaggatctgttatatttattttttctttactgagaatataattaaacttcacaaaagttgaggatcactgccactaattttggaccctcaactcagaacagatctaaataagacagaaaagaagaaaaccttattgtagaatcttgttgacatttctgtattacattcagagttccagcaaaatctttagagcgttaatacatctgtggggaatgtcaccttttttcaaataagaaagaacaggcatccatgtaacatttccttgaggcctccattcctctcccgattttaaaagaaattgtatttttaaaccacacttctcagtattgctatccaggtaatatgggtagaatttttttggcaatgtggggatgaagtcagaagtcctaaagattctttaaggttcggtgcctctatattcttatgcattttgacagagagtctataggaaggagaatgtcttcttttgtatgtgaaagcatccaatggcagcattagtgtggcgcttgtgacagtaatattggagctatatatttagctactctctatagcaaatagttgcactcgaacaaatctgtagagtttattttgggaatcttgaagatttcctaatgttgatgagaattgagtctgactttagaaacctcggggtataaattgttctgataattggtccaagttgaacctggagaaaatgctgatgtgttcactcttaagcagagtgattcatcatgtaaaccttatcatagcagctctggcagaagggagagaagtgatgtagggagtgagaaattaaaagtaactggaaatggtggttataacatgcacaagaaactttcaggtccttcaggaaaaggttgctgggtagccatattctttaccatttcaattaataagtgttttctgttctgtttatagaaagtgtcctttctttccatgcaacttgcttgaaattcccttgaccctcatccccattgttctatgcccatgggattattttttggctttcgtggcttcccagttaagtagcgttcagaaccatggccagtcctggttcagaactggctattctagtccctaaacagcagtaaaggcaagtgctgtaagattatgtttgtgttgaacatatttttgagaaagataattgagattctgcagtttcaaatattgtaaggaagtgtgtggcactaatttgacatgactattctcaatttagcaactaaaaaaccttaattggcttgttttccttataaatatgattttaatgctaattttagaaaatttagaacttgcacataaagaaaacaaggaaaatgagaatcatcagtaattcttccacttaaggataataattgttaacatttagtgtatgtccttctggtggttttttttctatacatattatataagttaataagcctgttgttgcaagtgcaagaaactcatttagaactggaataaacaaacaacaagaaagaatttttttattcactaaaggaaggatctgggtatagctgggtttttggggaaagtaatttgatctgaacaaaaggctacaagaagctaaacacaacaactagaagtaatgattatttagatacttaaggcactgggtaccttgtaattttaacaaggcagatatgccctggtggttaaatgtgggtgaatggatggggttgcatgaattcctcttttttgagtcctcacttagcttttcttctggaaattctctggcatgtgatatgtgtcaaaagacgtaatttgggtctcaatcaggacagcacaatgttctgaactctgtacttacccccaaaattcctgttatccattatgtccatctagacttctttgtctcctggttttgttttcactactgtgttgttttggcatccccaaactactgtgttgttttggcatccccaaactactgtgttgttttggcatccccaaactactgtgttgttttggcatccttgggaacgttgggagttgacatccttggcagagtattgagagtttcatgcttgactctgatgatggtgtctgtgatgcggtaccccttccaggtgtttttttgcagatagagggcatcaacagagggctgtagccaaaagaatcaatatgtgtgaaacatcccttggggacccagcaaattcttgggatgttaatttattagggggaatgcagtcttacgatatgcagatggcgcaattgggtgattaccgtttctgtgaacctatttcttctcaaagcctcatgaataccatgcaaacttggattaagtgaggaaaatggtatcatggaaggtgaaattcggaaaaagtcaaaatgtttagtttcatcattagtttagttacttagtttaggtcaccattgaggctgctaaaaactaaatgattgatttgaattttacttttctctctgatagtcttggaatattgaaataatattaataatatgcttaatataattacaattaatataattgggataattaataaaagaagcagcagaccaaaaaggctgtgggccaataattttttaaacatggaatttcatggaccaaacttactttactgctgtaccatcattgagactacccctttgagaatggcttagcagcgttttaaaaagaaagatacatatttacatcactgacagaaatcctcgttttaattttttaacccactgctttggcagaagttaggaaagaactacacagaataagttatagaatacaaggagtactacctttatgttctaaagaattctaagtatcttatagatatgacctgaatccatgtaacgtttttgtaatgtaaaccccaggtagattatttttctacatttttaagataaaaagctacggtacagatatttcttaaaaatgtctgagtaaactctagtttttatcaccacttgctggctgaaattgaacttactctgctcctaactaaggtagtttgataatattatgaaactcaggctcttaatgctgttgactctctatagctgaataataatatcatggcatattaaggataatttgtgataattgacagcttttcttgagtgggagcttattaatacttggatacctaaatatgtttaaaattatctattttaatgaatactacttggctgtttcagtttcttagctaatttgaaagagaaaaagtaactgtctaatttacttgtctatagcttgctaacatgtaaattgatggtaattttctggattggttggggtaaaggtatgttaaggcatgaagaaaatctaggtaacttgtacacatctctccaaaacttggattccattaaaaaaaaaggttgttcaatgcaattagtttggtgatacacttaacacatggaaattagctctactttaacctgttaaaatggaataataggagggtatatcaggactgttggttgcaaatggcagaaaatttagctcagattgctttaaaacaattttgcttttaatttaaattgtaattgtcaagtatgattgaaacatagctgacttcaggcatgggtggatctaggcattagaaacctacatctgccttgcttctgagttattacatgtttaatttattcttaggtagactcttcccttagagttgcaagatggccatctgtacttcatagcttttattgccattttagcctctcagcataatgattaatttcttagtagttctagcaaaaggctgacatttatttactctgtttcacctatatcaggtcaactgcccactcaaaaatgaattgctgtgtgtggcaagaagttgtgatattctcattgctcagacctgggtcatagggccttgtggattaaaccaaatggttatacaagtataaagatggttctccagaagaaaatgggatgctgtcattagaaaaagagcttaaaggtggttactaacagatgaccactacaatgtgtgtgtgtgtttgtgtgtatgtgtgtgtgttttaaacatttatatgtttataaaactttattcatttagttattctcatttcttttatttataaaggtgaaaatgaagtttgaggattttatatatatatttaagtgtgtttttagagtgttacagtggtctggtaattattattaataagaatgcactaccttatgtctacttagcctccctccatgcctcatgccccttcttcccttattcttgatatcctggaattgcacatcccaataaacattagcacataagctttgcctgagtttctactttctggggaatatgaatggaaaatgatatctatcagacttacttagggggctgtttcaaatgataaatacaccaccgtgacagtcctttgatacattgtatgcttcaagtttataaggatgagaaaaggtgtaacaccacgacattagacttagaaatagttgacctaagtttgatcctaactctgctacttactgtatgacattgagtaatttgctgaacctctctgagcctcattccttcatgtggtcaacaaagggtcagcatgataacatgggttctcagggaggactgcttggggtgcctgtgaatcattaggcaatttacatgcatctccaagcctcagttttctcatgtgtaaaatggagatagtaatacaatctacctaacaggtttgttttgaggattcaatgagattgtcattcatgcgaagcatttgtaaagtgccttatctattatcatctctgaaaaagagtaaaaagctgcctctttgaaagattgtgaagattagctgcattctctaggcagctgttggagccatttggtttaggtctgagcacctgagctattgtaaagcatgacataggtataaaatgatgtctttttctaggggaaacaaaactactgtgatatatttaatacataaattgtggaagttttaacaaccatgatatctacctacaaacttttgtctcacaatgaaaaacagaaatgaatacttaaaatgataactatgtaaaccagttgagaatagcacattaataacttaaaaatagttgtttctttttatactttggtttgaaagctgagattgtaccagattgtggactctgcaaagaagaaaatgtgaaatccagaagtcctcatttaacttgtttaagggaatttatatgtagacttgtcatgctcagcaggaattcttcattgtgatcactatttctattaaagcaatttttttggaagcctgcagggtggccacagtgggatgcttcctataccaaaaccaaaagggtacattcgcaaaatgccttttggtgaataatgaaccaaatttcaactaatttactttctgactatttcatatgccactgtgatttccgtgtcttctgaaatctaatacatttactgcctatattgttcatatagcaatctgatcgtgttttcctttaattcttttaaaaaatgagattaaccattagagtgtggcagctaacaaatgggcttagaaacaacacaaatgggtttgaagtcatatcacttagtagttgtgttatcttgaggaagtcccttaccttcttaggatgcattttccctgtctataagagtaatgtaagggaataataaaagtaactatttcatagacttgtgtaaaattaatgatataacaaatgcaaaacatttaacacatttcctgggatagcgtaaccattcaaaaatattagttattgcttattatagttttatccatagcatttcccctactatgtattatcttttcttctttttattttttatttttatgggtatataataggtatatatatttacggggtacatgagatattttgatacaggcagacagtgcataataatcacatcagggcaaatggggtatccatcacttcaagcatttattatttttttgtgttataaattccaattatactcttttagttatattaaaatgtacaataaataattattcattgtagtcaccctattgtgctatcaaatactaggccttatttattctaactatatttttgtacccattaaccatcccccaccccacctgctcccaccaactaccctttttagtctctggtaaccatccttctactctgtatctccatgagttcaattgttttaatgtttagtttccacaaataagtgaggacgtgcaaaatttgtctggcttatttcacttaacaaaatgtcctccagttccatccatcttattgcaaatgactggatctcattcttttttcatggctgaatagtactccattgtgtgtatatatcacatttcaaaaatccattcatctgttgatgctcacttaagttgtttccaaatcttggctagtatgaataatgctgcagtaaacatgcatgggagtacagatatctctttgatatactgatttcctttcttttgagcatatacctagcggtgggattgctggatcttatggtagttttgtttttggttttttgagaaacttccacgctattctccatagtggctatacattcccaccaacagtgtatgagcgttcccttttctccacatccttgccagcattcattattgcctgtcttttggataaaagccattttaactgggtgatatgatctcattgtagttttgatttgcatttctctgatgatcagtgatggtgagcaccttttcatgtacctgtttcttagttgtatgtcttattttaagaaagatctgttcagatcttttgcccattttaaactagattattagatttttcctattgagttgtttttaactccctatatattctggttattaattccttgtcagatgggtagtttacaaatactttcttccatcttttggttgtctcttcactttgttgattgttttctttgctgtgcagaagctttttaacttgatgtgatcctatttctccatttttgctttggttgtttgtgcttatggggtattacccaagaaacctttgcccagtccaatatcctggagtttccccaatgttttcttgtagtagcttcatagtttgaggttttaaatttaagtctttaatccattttgatttgatttttgtatatagtgagagataagggtctagttttatttttctgcatattaatatccagttttcctagcagcatttatcgaagaaactgtttttccccaatgtatgttcttggcacctctataaaaaatgagctcactgtagatgtatgagtttgtttctgggttctctatttattctgttccattggtttgtgtgtcatttttatggcagtactctgttgttttggttactgtaggtctatagtaaaatttgaagtcagataatgtgatgcctctagttttgttctttatgctaaggatggctttagctattctgggtcttttgtggttccatatagattgtaggatttttttttctatttctgtgaagaatgtcattggtattttgatagggattgcattgaatctgtagattgctttaggtagtatggacattttaacaatattgattcttctaattcatgaacatggaatatctttccattttgttatgtcttcaatttcgtgcatcaatgttttatagttttcattgtagagatctttcactttcttggctaagtctgttcttaagtatcttattttatttgtaatgattataaatggaattactttcttgatttctttttcagattgttcactgctggcatgtagaaatgctactgatttttgtgtacttgatattgtgtcatgcaacttaactgaatttattagttctaatagctttttggtggaatctttaggtttttccaaatataaggttatattatttgcaaacaaggttaatttgagttccttctttccaaattgaatgccctttatttcttctcttgtttgattgctcttgctaggacttctagtactgtgttgaataactggtgaaagtgggcatccttgtcttgttttagatcttagaggaaagactttcagttttttgccattcagcatgatactaggtgtaggtctgttcttctattaatattatattgaggtatgttccttctgtaaccagattttagagggtttttatcatgaaagaatattgatttttatcaaatgctttttcagcatcaattgaaatgatcgtatggtttttgtccttcattctgttgatatgatgtatcacgttaattgatttgcatatattgaactattcttgcatccctgggataaatttcacttggtcatgatgaatgaactttttaatgtgtgttgaatttggtttgctagtattttgttgagaatttttgcatcagtgttcattaaggatattggcctgtagttttccttttctgatttgcctttggttttggtatcagggtaatataagtctcatagaatgagtttggaagtagtctttcctcctctatttttagaaatgttttgggtaggtaaaacagagatatagaccaatggaacagaacagagccctcagaaataataccacacatctacaactatctgatctttgataaacctgacaaaaacaagcaatggggaaaggattccctatttaacaaatggtgctgggaaaattggctagccatatgtagaaagctgaaactggatcccttccttacaccttatacaaaaattaattcaagatggattaaaaacttaaatattagacctaaaaccataaaaaccctagaagaaaacctaggcaataccattcaggacataagcatgggcaaggacttcatgtctaaaacaccaaaagcaatggcaacaaaagccaaaattgacaaatgggatgtaattaaactaaagagcttctgcacagcaaaagaaactaccatcagagtgaacaggcaacctacagaatgggagaaaatttttgcaatctactcatctgacaaagggctaatatccagaatctacaaagaactcaaacaaatttacaagaaaaaaacaaccccatcaaaaagtgggcgaaggatctgaacagacccttctcaaaagaagacatttatgcagccaacaggcacatgaaaaaatgctcatcatcactggccctcagagaaatgcaaatcaaaaccacaatgagataccatctcacaccagttagaatggcgatcattaaaaagtcaggaaacaacaggtgctggagaggatgtggagaaataggaacacttttacactgttggtgggactgtaaactggttcaaccattgtggaagacagtgtggggattcctcagggatctagaactagaaataccatttgacccagccatcccattactgggtatatacccaaaggattataaatcatgctgctataaagacacatgcacacgtatgtttattgcggcactattcgtaatagcaaagacttggaaccaacccaaatgtccatgaatgatagactggattaagaaaatgtggcacatatacaccatggaatactatgcagccataaaaaatgatgagttcatgtcctttgtagggacatggatgaagctggaaaccatcattctcagcaaactgttgcagggacagaaaaccaaacaccacatgttctcactcacaggtgggaattgaacaatgagaacccttggacacaggaaggggaacatcacacactggggcctgttgtggggttgggggaggggggagggatagcattaggagatatacctaatgtaaatgacgagttaatgggtatagcacaccaacatggcacatgtatacatatgtaacaaacctgcccgttgtgcacatgtaccctaggacttaaagtattgaaaaaaaaaaaaaaagaaatggtttggataggattggcattagttcttctttaaattcagctgtgaaaccattggtcccaggcttttctatgctaggagaccgtttattatggctttaatctaattacttgttgttagtctattcaggttttgagtcttttcttggttcaatcttggtaagttgaatgtgtctaagatttgtccatttcttctaagtttctcagtttattggcatatagttgctcgtagtagtttgtaatgatcctttgaatttctgtggtatcagttgtaatgtctgcctattcatctctgatttcatttatttgggttctctctttttttctcttaggctaaaggtttgtcatttttgtttatcttttcaaacaaccaggtttttgtttcatggatcttttgtattgcttttttaaaatttcatttattcatgctttgatctttattatttttcttcctttactaattttgggtttggttttattttgcttttctataatagttctttaagatgcattgttcggttttttgtttgaagtttttctactttttaaattatcgctttgaataaactttctaccccaatctttctctcccttctctttatgccaataacccttagctttgcccttttaggctgttttctagatctcacaggtgtgtttcattcttttttcttttgtctcctctgactgtgtattttctttttttttttttttttgagacggagtctcgttctgtcgcccaggcgggagtgctgtggcgcgatctccgctcactgcaagctccgccttccgggttcacgccattctcctgcctcagcctcccgagtagctgggactacaggcgcccgccactgcgcccggctaattttttgtatttttagtagagatggggtttcactgtggtctcgatctcctgacctcgtgatccgcccgcctcggcctcccaaagtgctgggattacaggcgtgagccaccgcgcccggccgactgtgtattttcaaatagcctgtctgcgagctcactaattcttctgcttaagtctgctgttgagagactctgatgcatccttcggtatgtcagttgaatttttcagctccagaatttccacttgatttttaaaaattatttcaatctctttgttaaagttatctgataggattctgaattccttctctgtgttatcttgaatttcattgagcttccgcaaaacagctattgggaattctctgtctgaaaggtcatatgtctctgttacttgggattggtcattggtaccttatttggtttgtttggtgaggtcatgttttcctagatagtcttgatgcttgtatatatttgtcaatgtctgagcattgaagagttaggtatttattgtagtctttacagtctgggcttgtttgtacctgtcttgggaaagcttttcaagcattcaaagggaattgattgttgtgatctatgactttggatatgatatcgctgcagccatgtctgcgttaggcagcaccataagcccagtaatgctgtgactcttacagacttgcaggtttaccacctttgtggttgtgttaagatctgagagaattccctggattaccaggcagagactcttgttctcttctcttactttcctctgaacagaagaagtctctctttccatttgagctacctggagttgggggaggtgtgactcaagtacccctgtggtcattactactgggattatactgggtcagactcgaagtcagcacagcattggatctcacccaaggcccacagtgaccattgtttggctaccaccaatgttcagacaaggtccaagggctcttcagtcaccatgtggtgaatccagccaggcttgcgtccttcccttcagggcagtgagctgagggcaggtacagaaatgccatgcaggaaccagggcctggagccgggaactttaggaatctatttggtactctattctgctgctgctgagctggcacccaagctgcaaagcaaagtcctttacactctttcttcccctttcctgatgcagaaggagcctctctgcatggcagccactgccccgtgcctggctactgctgatgttcagtcaaggctcaagctggctattcagtcagcttatggtgaatgctgccaggcctgggtttctaacttcagggaagtgggctcttctctggcccagggcaggtccagaaatgctgtctaagagcgaaggcctggaattggggatcataggagcctgcttggtactctgctccactgtggctgagctggtgcccaagctgcaagacaaagtcaccttcattcttccctctcctttcatccagcaggcacttctccccatggccaccacagctgggaatgcactgggtcacacctgaagccagcatagctctggatctcactcaaggtccatggcaagtacttcctgggtacccttgatgtttattcaaagcccaaggtctcttagtcagcaggtgatgaatcttgccaagactgggtccttactttcaaagcaggaggttccctttagcccagggtatgtctaaaaatgtcacctgggagctagggcctggaattggggccttaagactctgcctagtatcttaacctactgtggctaagctggtatccaagttggaagacaaagtcctctttactcttccctctactctcctcaagcagaaggaaggagtttctcccagagctgcactgcttggagttgggggagaggtggtgcaagcactttcttggcttcccaagctggtgtctcgctaagtcatatgcaccccaagtctcttggctctgagcccagtacagcaccagtagaaacttccaggagttgcaaactagtttatgacacacgattttggaattttaatcccccaaaattgatatactggttgctcaggtgcctatatgtaataaataagacaacctatgaaaggggttaggcatggtacctagagaggaagacctggaggtagtgttacatccttcttccattccattttgcagaagtcaccactgagttgctgtctaatgagtagtgattcatgttttgctaaattgagaatgccagactacagagtaatgctctgtggaggagagccgagcagggatatgtagtatctatgctgttttttaggcaggagaccaatttatttttttctgttagaggtggggacaaacctacatcacatctttagaaatggacaaaaggttgattatctgactctagacttctcccttctagaagctaattctatggagtacgtatggacacaaagaagggaacagacacaggggcctacgtgaagtggagggagggaggaaggtgaggatcaaaaaactacctattgggtactattcttattacctaggtggcagataatctgtacaccaaacccctgtgacacacaatttacctatatagcaaacctgcacatgtacgcctatatctaaaataaaagttaaaaaaaattaaagctagttctgatttagggatctttgatgttgaatgttgatgaaaagtgatttatatttgtgattgctagtttcagaaccactacgatgaaaaaagtgactaaacttttggtaatgtgaacacactactccttagaagtattgtccagactccaaattctgcctgtcatttcttcattttcatgccctcctgattgcctaaaatagttagacttcccatttcatgattggaaaggcattgcaaatatttttacattaaagtcctggaactgtagattattttctaccagggatattaagaaatttcaggccaggtgcagtggctcatgcctgtaatcccagcactttggagggccgaggagcggggatcacaaggttgggagatcgagaccatcctgactaacacggtgaaaccccgtctctactaaaaatacaaaaaattagccgggcattgtggtgggtgcctgtagtcccagctactcaggaggctgaggcaggagaatggtgtgaacccgggaggcggagcttgcagtgagctgagttagcgccactgcactccagcctgggcaatagtgtgagactctgtctcaaaaaaaaaaaaaatttctaatcacaaagtaaaacatattcattgtaccttgtatcagtatgtactcaattaccttattttaatgttctgcatacatttatatttagcagatttttttctggtattggtttatgtgctaatttacttatttatttaaagaataaattacttagttaatatttattttccctacatacatgtaaactctgtaagatcagagatctttttgtcagaggctgaagataaagcctgttaagccaattaagagcatagacagtgctcagtaaacatttgctgaatggaatacatgagtgaattgtaaacactttggaatttatagaaaagtgaacataagaaaacagaagccctagaaataaaccatataacactgaaagtgtacctgtgtatttaaatatgcctgtatatgtagaagtccttgctttgtaccgtagtgcatgactgtaaaaaaaagactttgcaaactgaaattatgcaaaacaatcctaataatcaatgaaaacagttactattgctctttgacctttaaaaatttttaaatcactacagtctctcttgttgttagctataaaggtatagggaaatggaaaaaggtaaaactaatatttattcagtacacagtaatttaaaacattagaaatattgatattaaaattgtttcattgtacagtcttatcaggagtagtttgaatagtgcttgccttcttcctgttgtacaacttatgatacagagcatgcattttttttcaatgcctagacaaactgtcatgctctctaaatgtggatcagcttacattttatcctgtgtgctttccatgtcaagaaatgtctcctaaaactccttgaatgtgaagtttttagccagtatcactttctctaggacatcatcatccttttcattacaatcactttccttgtttatgttgattaattcaccttcactaagttcctctaactgcatatacagagtctttcaatggtgaatggcagcatcgtttacattccatgattagctacgtcgtctccatttacgtttgatacaaattttacttccaatagtattaatttttgtttgtgtacattgccttcattcttgttgtccagttctgtctttgattatccatgtcacttgcatttatctttgggagacaagaaggcaacacagctacacactttgctgtctgtgtgtgaactgaacaacaaacacgcagtgatcaatcactgacatattttaaagaaacaccccatgattggtcaatgatcattatgcacacatgttagttacgtagtgatttatggactgaagagctagctgcaaagtttgtactttatgaaattactattaatataccatgttaactgaaatttgaactgtattgttagggactatgttatttaatctaaattgtggtgactgaaatgtacacatatcagactgagcaccgtgagggctgcctcaattcctagctttattttatagaaatatatatttcttgtttctttactaaaatgggatcatttaatgtgtattatttttatttttaattttatatggtatacatgtcaaaaaagtccagctattttgacttcatattttatgattgagtggtatttcattgtgtagttgtaccatactttatttaaccaatcttcctttatggatgtttaggatttttctgttttctcagttataaacaatgctagaatgatcacctctgtcactaaacctttgagataactcttatttatttagaatgaatgtatttctagtacaagaattgttggctcacaggatatatacactatttaaaaattttcatgtcccaccagaaattttcatgtccttcaagcatttccctttagagagatgtttccatttaggctcctaccagtaacataaatcaagaagtgctgggtgcatgattcccaaacccttgcccacgttgggattatcatttttttttttatttttgacatttaattaattaattaattaattaatttatagacagggtcttgctttgtcacccaggctggagtgcaatggcatgatctcggctcactgcaacctctgtctcccaggttcaagccattttcctgcctcaccctcttgagtagctgggaatacaggcacacgccaccacgcctggctaattttttgtatttttttagtagaaacagggtttcaccatgttggccaggctggtctcgaactcctgacctcaggtgatccacccgcctcggcctcccaaagtgttgggatcgcaggtgtaagccaccgcgccctgccattttttgacattttaataggtgaaacacattttattttaatgattagtttcgatttttaattaggttgaatatttttcatgggtttatttgtactaaataaattttgatctatggaattttattctgtcctgtattataatagttttcagatggtagggatttttggttttattgggtcatttgtgtacatatatttctacaaatttatatatgcatgtgtgtatgtgtgtctatccataataaatatatttgtgtgtacttgaactgcattcacatgtatataacattgttggttttacccagggattttgaggagtatttgtgggccttaaatttgtaacatgaccatcaatttccaactgcttttctttctctctctctctttcttttcttcttcttcttctttcttctttcgtcgtcttcttcttcttcttttttttttttttgaaagggagtaacccatgacctgggggaaattctagttaatttttcattgcatgattttcaggagatagggtcaaaaggagctagtagggcattcaattatgtgcttgagtgtgttggaaaatgttttttttttttttctctctccctcaagtgtacaatattttacttgggcttgtttttcaagtgcattgaagtgtgactaaacatttttgggtactaccattctgtaaagaagagggcccatcttgttaaatattccttcatcaactttgcagttagccagttattggcagggagaagcctgcgagggcatgagctttaggcattggacagagggagggtgggtgggaggcggggacttgggggatctcaggattggggtactttgttgtccctcccactgctgtatgaaaaagtgactggttcaagctggcttttgtcttataattttggatgagtcataagtggagaaggaggggaagtgagtggttagacctcagctcatctgagggctaaaggttctttgtgacacatcacacagaattggagtgctgtccttctggagagtggtggagaaccaagatacagttcagaaccaaaggaatagagaagggctttgatttctttttggctttagattggggatttgggaggcttagcaggaaagatgtccactgaaaatgtggaagggaagcccagtaaccttggggagagaggaagagcccggagctccactttcctcagggttgtccagccaatgtttaaccacagtattttcacttctgcagtctctcctgctgcagaacgcatccgattcatcttgggagaggaggatgacagcccagctccccctcagctcttcacggaactggatgagctgctggccgtggatgggcaggagatggagtggaaggaaacagccaggtgaggcatagctgactgtatgtagtactgacccagggaaacaagggcagggcaagatgcttgatcctggagtgccgttctttagccttagcactttgaatggccaatgggcatgatgttggctgggataaggagtaaataattctatttcttcttttcttttttgttgacatgaatgcagggcacctcttatttcactattggggcattgtttcattgatccatgttgctataattttggcttttataaggaattagaaataaagctcaatttatatactatttaatagtaaaatattttagagagataataaactcaggtacccaaaaatgacagccaagagatatgtttccacagtgtccacatgccaagatctcttgtgagattttgtgtgacttattactcattccctgtcaagaggtgggttttggccaggtgcagtggcttgtgcctgtaatcacagaattttagtaggccgaggcaggtggattgcctgagcctagggttcaagaccagcctgggcaacataatgggaccccatctctacaaaaaaaaaaagaaaaaaaaatcagccgggcatggtggtgcatgcctgtggtcccagctactcaggaggctgaagtaggaggctcacttgagcctgtgaggtcgaggctgcagtgatctctgatcatgttactgcacttcaatctgggtgacagattgaaaccctgcctcaaaaaattaaatgaaataaaaaagagattattaaaacaatgaggaaagttgctcttatggtagtccccccaaggttatccacagtttagcttttcatggtttcggttactcactgtacagtacagtaagatattttgagagagttgccacacttatataactgttattacagtatattgttgtatttattctattttattattaattattgttgttagtcccttactgtgcctaatttacaaattaaactttattacgttttatatacaggaaaaaaacatagtatacatagggtttagtactatccatgccttcaggaattcactgggggtcttggaatgtatcccctgtgaataaggggactactgtatttcaagtataaacctgtaatcttttaaatatccagctgaaagtagaaggttcatctgagtttggagtttagaggcccgagtttactttgactctgttgcctcttagtgacaagacactcgatttcctagagctttggtctcattatcaataaagagtggataataatgcctattacatattatatatgtatggtatataaaacatatatgtaaatatagtatacaatgtatttataatgtcacatatatacatacatgtgtatatgtatatgtatgaaaatgctttgtaaattgttaagcattacacaaatacctggggtttcattaatctcataacagagcttttcttttacatacagattcagagatattctccaggtgaatcttctgtgacataaggcaattatgtaatacaaagactttgattataatgcagttgttggtctctcattgtcatcattatgtgctgattccaatgtatttcactttcataaacaagataatgttaagataaacctcttatagtctgtaatttaattccaatcaattcaactcaaccagtgttatttgaatgaatagtttatgtcaggcactgttttaggtaccatgaatatagcagtgagcaaatgaggatcttacatagatctctatcttattaaaaggtttgaagtaagtttaatataataccttacaatatgagaataagggaaaccaaatcattatcccagctttgagtttaagaaaaacaaagcaaagatagatgaaagtcttcttctgtggttatagatggaaaaagtatttatggctgctattttttctacatagacttagaaagaaattctagagtcagaaagaaaatatttttaaaaatcgctttaatcaattagagcagatgagctataaaggagcaataagccaatagcctttccctttatggatgaagagtcttttaagagttagaggaataatttttattttctgaggcatactttaaaatttcttacatcataccacttgtaatcaagtgtttatgaagttaattggattttttgtagtttagttacttaggcttatgctttgtaggcttatggatttatttttatttccacaattttaagtaatattgaatgtctttagccctttgggatttttaatactggagaagcttcataaattaatttatttgataatgggggagaagtttttattcctcaccaagagtttctaggtagcttagtcttgcagaaaaaactgctttaaaaatgtttagaactgatggagaatttcttatctttcataacttaaacaatgcccagaaaaaaagtaattcggctttactcctagccccaacagtagtattagggaaagagacctaatttttaaatactttattttcaatttactgggtaattctctttctaatagacatctacagtgggtgtgattgtttaactcttctgtttgatagctacttaatattttcttcttctaattaaaaaagctttcataacacatttccactcctcatctgtaatactttcttttgaagcttttcattctttgctcttttggggcttcctcccaggatacatcaactgtttcttgttcccctctctcagaaccaataacctgtatagaaaaaaatcctctgtaaagtaaaattttagttcctaaaacatcctccaaaagaaggcttccaaagcaaaagctttttactagtgaatctgtttcattctttcttttccttctttctgatagaaaaatacagtgtgagaattgtcctggtgcagcctgaagtgttgggagattttggtctagtcttggctttgctgctcactagctgtttcactttgagcaagtcatgtagtctttctgagcttgaatttcttttttatcagatgaaggtcgtattgagttgcctcctccctaacattatatatatttcatagctctaaaatttaattcctgtgtgtatactgctacactcagctaagactactttgactttcttattttcatcttgaagttctttgtgagttgttatcatagagtataattcaggtgtagttttctgtttttcatttcagtcaaatgcagaccatacgttattttacataattcctggtcccagaaaggtagagagattatagttcattgtataggtaattcaacattgaatgataggagcataggattttcactcaagatttttaaagattaagatggttttgaatactttaccatccttagagacgttatttccttgggagcacgtgtgccattttgctgatgtagtctgtccccaagacaccctactgctggagaggaagagtgttgggagtgtatcgtgtgtcacgtccacgctgtataacttctctttatagggcttaccgtaattgctgtcgattaattcattatgtatgtgatattattgttttcatatggtctccctcattacattaatttatctgcagagagactaccatgtctgttcactatcatatttctagttcctggcagtgtctgattcataataggctcttaataaacatttgtttaatgtgtgattggttgagaactgattgccttcgacacaactgttctgaatataatactttcttagaaatattaattgaccaaatcagggttctgtataattattctctttctgactgataaaaagctatggaatgaaagacccaaggtacccagaatgccattgataaagcttagaaggggacctatgtttaaagtttcaaactatttcattaatatattgatgatatctgcatttataaaagcacggatataattccttatttaattggaatcaactaatcggagggctaataggattctcaaaattgacatgtctaaaactgaacttcagatctactcttcctaaagatttcctcttctcaatagacaattccattcttttagttcttgagccagaaacattggagtcttccttgattcctgtctttctctacacccaatatctgaccaattggtaaattctgttttacctttaaagatattcacatattcagagatttcactacatctcacattcagtactactacaactctagttcatcccatcatttctcactgagattgctgcagatggctcctaattagttgatctcttttcatctgctcttacttcctttatgaattatctgccatcatctctttgaccttgtcttccttttcatttcctctgcttcactctgcttgagcctcactggccagtcatgctaatctgtcaggaactttggacttgttgttccctctgtctgaaatgttctgtcttccctgaacccccacagttatctgcgtggcccatgtcctcatctccttcaggtctttattcaaatattacctgcttagtggttgtcctatctataattgaaaccttcccccaatgcttcctatccctcatctttcattatttttgtccttagcacctgtcatcatttagcataccatatatcttgttattgtctcttcccaatagaattaaagctctgtgagggcagaaattttcagttgttttgccactgtattcctagtgcctgaaactacctggcacacaggtcatgctcaacaaagactggttaatagaatcaatgaatagagaaatagaaccttgattcttggtttgctgctccacctacattctttggagaggcgtggagtgaatatgcttctggaaatattcagcttttcagtaacctttactatctgggacataccctgctgtcagaatgtttttgcagtaatttttgactcccatttgtgatgtctagtttccagatatgatagttttttccccccattaaaagccctcagacctaccagactaataaaagtttaatgcttagaaggaatccattttacatatgaagatgtgacatgaatctttttctggccaacttataaattgataatattttgattttctgtgaaagtcgcaattgatagcctattttatttcatagagagctaactctccagacttctccagctccatgtaggttctgttataaatctacagcccacagaactcaatatcatccttctttctcttttaagacctatacttttcagttggctaatgatttcttacatattattgagatggctaatgatttcctacacattattgagatgaggaaatctgtaggcagagtagatctgaagttcagtttaggatattcttgtaggatcaggataataatgcatcagcattattatggctgtagtactacttcaggaatttcaggttggccctgtgcctaaaaaaatgagaattgtttcaataatagggggagatgtccccttttaagtcatggaaagcacagtagttatactatgaacaagattaagtatttatttatatgaagtttaaagtaactctcaactctatcaccatcccttttacgtcctttacctgttcttccctttcctaaaagttagaactttgaattttcagtggttcttccaaaatagagcacaagttgaatatggtaaaaagggtagacttatcagacctgaaaaatcgtttggaattggtgaagaagcctgtgcttccattaagaatgtctaggtgactaggtgtcagctaatgggttcataaagcaaactggtaaaagaataattcatgatccaagtttgatgatggcccaaagtcaggagaaagggactttttttttccctgcccaaattctttattcatttgagtagggatatctctgcaaaaatgattattagctgtcagtttctcttcagtgaattttcagatggacagtgctggacttaaccactgttgtatgaatgtttgttaaagataactcccccagcgtaattcaaactgtgctgccaaacttgggtataaaggaaagccatcacaagtttcaacaaacacaagccaacaaaggaaaggggtattgatgttttacttccaactggacaccacaaatgtacacccacttgtgtttctgcttggcagatttacttcaggtaaatctgaagtacctgatttaagggcatggccattaagcaccaacatgtgcacttatactgtgggtttgggcaaagactgctctctcccagtctacactgacttctctgtcttttctctactgaattactttgggaaattctatttcaggccaagttaatttttctgtaagaaaaagactcaaggaatttaatcatctatgtaatcatatatagttatgtccatgtagttgtgtacaataactttaatagtggatctagaattttaagaattctccttaaaaacctcatttttcccaggtacacactaacgttggcttcttttagggtgataaggcacttgttagttagcaagacatttatcatcatttcaatagttgtacgtagttggaatttatttagtgtaaaggtcatgtctgttttccactgtacaactgatatgttattaagttagaggtctttttttttcttaattatatttaatcatatgattggaaagttgcaaaattcagtgattcccagtgggtcttttttttcttcaacaaacgaatgaaatgttgtttgtttggcagtcactgaaaatgtcttaaactgcaaagtattttatcattattcttctaagaccttggaataaacttcacctaataaacccctcctccaaggttaaaacggttttgtaattgcaagtatttaaaaagcctgcttctgaaacaaatttttctgtaacatgtcaagtactgaagcaaaaagaaagtgggaaacttattgcaaatatgtagttattcatagttattatgaaggggagatagtggcttttagtatactattgcaaatatgtagttattcatagttattatgaaggggagatagtggcttttagtatactctacagtaaaaagtctgttttttttttttaaacgtaattgcatggttctaaagcacctttgcagattcattggcacttgaatagggtgaactttggtacttttgccttagccttttctttaatgggctctgatttgaactgagtagttttcagtttttgtttttattttccaaatccaaatttgtccttgatatgcgaggaggctagacaaagcatgtgccatttctggaatgaaactacctgaaaatgatctgtttaaatgggaaagccagtagtttatgtccaaatgcatttgttggaagtataatcagttccttaaacaattagagcaatacattttaaagcaatttaataggcatttttccagagttctccttatgctgtaagctgtgctgtaatatgacatcatcaaaatattcaatatttactgaacttaaagtaaaataaatgctaaactgagctatgagataatatttatcccttataaatatagattttaagaaactggctagttttgagaatttatatttccattcctttatggttaaatcttgacctaaagagctggtgtaatccagaagggtgagtaatactatttcataaatccaccctagtttggatttatgttttgcaaatgcactttttaaatgtattcaaagtcatatttaagtctaaccaggttgcctacaatataaactatggagaggaataaataaaagatggaccacaaagaactgcagtggttttgcttctttttctttttagataaaatcttattaaacttatattatttggacagttgaggattgtctgagcctattcaggctgctataacaaaataccatagactgggtagcttacagacaacagaaatttagttcttatagttctggaggctgggaggtccaagatcaagacattgtcagattcagtgtctggtgagagcctgctttctcacacatggcaccatatcattgtgtctttacgtggtggaaggggctagatagctgtctggggactcttttataaagtcattaatccatctaatcacctcccaaagggcccatctccttataccattcccttgggggataggatttcaatatatgaattttgtggggacatagacattcagaccatagagaggatgatggcagaaaagaactactgtatataagtgaggcttagtttttttttaagtaatagaattggcagtacaggctgttggcagctgatagaagtgggggctcatttaggaaagataagaaggaagtaaaggccttgtaaaacactcccctttacagggcttctagctgccctgtgtcattcatcttgggcttaaattctatgaccaaatattctatccctcagaaaataagcatactcttaggaattcaagagaaatcaaggagtcattacactctttatagatagatgacataattctagataactctgacttgctttcatatatgatgatatcttcctttttctagagtcttatcttgagcaataaattatagcatcatatataaatatgattcatatgcctattaccaacaaacatgcttagcgattctatgagcaagcatgaaaagatgatatacctaaagttaaccaatgtaacattctccatcaaaaataaattagtttcaaaataactctaatcaccttattaccttttacagttttggttaaacccatagaattctttgagtgtgatataaaattgtcgttttttttctcccagttccttttatttctgtggtctaacttgaatcaaagtgaagaaatactaatttagtcacacacacacacacacacacacacacacacacacacacactagaagtctttcattctgttttggaatgtgtcacagctacttttgtagaaataaaccaagtccagttctgaagtttcagaacttctttggtgctatcgttgactttttaaccatgaggtaaacagtaaaaatctcccttcctgcatttttggggaggatacagggagaagaaggagggtcttagaattgtgggtaaggttgatacaaggttaccactaacatgggagttgcctggctgtgagagccttcctgagaggcacatggaggggaaagtctttagatacggctaaaatacttctgaaacatatgggtgctgggcttgattaacattctaaattttctttgacattgtgggctgatcgcttgatctattttcactcctggtctactaatgtgtttttttttcccctcctctgggggtggtaagaggtctataaataataccctatgtagagcttcctctgatctctgccctttgttctcatctttagtgagttaggtgagcgtttagctttctctaggaaaacatttttcaatcattaagcctttgggtgaagaatgtagaaaaacaatttttattccatctttatctctttcaatatctctcagaaggtttaaagtgaaagaagcctttttgttagtatcatgatgaatagcaaaacgatgttgctttcccattttcctttaacagtgtaggaagtgtctgtgtaatatgtgggatataaagtctgtcaaatgtgttttgctctcatttccattaaggttttttattgctatatattgctaagttatcaaaatgtctaggagtcttagaaagcagaagctagaaaagagggttgttccatcgctaaggttaataggatatctcatattatcagaataatctgttgttcaccgagcttgtgtgtatttaaacacacatggaaccagacttgaagggtaaagcttttaaaatcacaataagaggggaatatgcatcagctgagatatgtatattaaaggaagacacaacaaaacgtgccggtcttccttaagcatcaataaaacgaaattttacattcatcttgccacttcacgcatcatgttttttatgtctgcgataaatattggttcatcactgatatttcaccttatttaaacttgcctcatgaaatcacaacagaatcctcacagtggtggctatttttatgcactgtaggctgtacccacatggagaattttgaaatgcatatttttctaccttattaaaaaatttagttaaataattggtcttaaggatctcatggttacatataggcagatataaaaccaaggatgctttggcttctcttgcttggcttttttcttctctaacttcaggggaaggagcagtctagtgcttctctttgggtgtgtttatgaagattatgtaattaatgatctaataagctattaatactccacaaaaagagacattttggaagtgctggaaggggtgaagatggaggggttgagactgctatttctagaggaagttagaacacttttaattgctcttcactaatctcatcttcctaggtggatcaagtttgaagaaaaagtggaacagggtggggaaagatggagcaagccccatgtggccacattgtcccttcatagtttatttgagctgaggacatgtatggagaaaggatccatcatgcttgatcgggaggcttcttctctcccacagttggtgggtaagtatgctgtttgaattttatcctatttttttcggctttccctagccacatgtctccatcaaggcagatgactagtactgtaagcagagttaaatgttttataacatttattctctctttttgcattataacattagtatgatttattgcaagaaaatctgaaaaatacacaaatattaagaaaatagaaaactatcttccataacatcttcctctggtcattgttggcattttggaatatttccttctagctttgcttctcaatcctttccctatgtttttgattttttttattttattttattattattattatttttgagacagagtctcactctgttgcccaggctggagtgcagtggcgcgatctcagctcactgcaacctctgcctcctgggttcaagcgattctcctgcttcagcctcccgagtagctgggattacaggtacctgccacttgtaccttatgtacttcagatgcatgaaaagtgtggggcttctttgcaaatctaactaacaagctctccgaaaaagaaccaagtatatgtacatcagccagacatatgcctcacttgacagctaatctatttcttccaacacaaatgctgcagcattcatattatctataatgtaaagaaatggatgtcatagataagccttttgtctacagatatacaaagaaactttgcagtaagtctaaaattagacaagaatgttacactggtcaccttctgcaggtctttgatccacatcttcttccccataatcccagggtaggcacactgcagaccccttggaaaagtgcagccatccctacaggtccagtgctcacctggttatggaatttcctaggaataagaagtggagcccctgcacttctttttaagaaaaaacatgatctttggcacacctagatctgaaggataatacggcagtttaggccaagctactgatagaaaatggaaacaatggctccagtttggaatgcagtggtgtgtgcccaaggtgttcagcatgatgagttagcattcaacgcacaaagtactaactacaaaggaagccaaagctgccctgcaccatgaggttcagtgactttgatggtggtgatacaaatgatgcttgacaccaatgtgacctgactcaatcacttacccgtaatgtcttgctggatccctgtcccacccagcctttcttcacatgcagctaaaggggcttgacttctgcctacaatcaaccctaacccaggaactagactacttctcttcttacagatgatttaagtcctactttacagatgatgaaactgaggtccagagaaactcagtgcaagtctaagatcaaagaattctagaaatctagtgtctggacttccagtccaatataaccaaggatggatgaataaagagactccatttataatgttaatcttatgctaataagtgaaagtgaatgtaaatctgtgcatacagaatgaaaaataactaaaaaggaaaagtatcgctgggcgtggtggctcatgcctgtaatcccagcacttttggaggccgaggtgggtggatcatttgaggtcaggagttcgagaccagtctggccaacatggtgaaaccccactcctgcctctactaaaaatacaagtggagaagggagaggacttatgtaaagatgctggatggacagaaataattattttatacatttattcagcagtagtacatgggcttctacaatgtgccagacactgttctaggccctgaaatcagggtttgtaaatctaccactttgtaaatgagacaaggtacatgtcaacataggtacaaatctgcatttgtagttagaaaataatggaggaaacaattttatatagcatttttcatattgaacaaggcaggtgaagctgaaaatggaaatctgatatatgagaagagatcttggattatggtacccagggagatcggaacccatctacaaaaacagaagcaagcagaaagaattattttctgggccatctgttccattgtcttttttcattcattaaaagctgcaagaaagattgttatccagaaaagtataatgattggcaacaatcaatccagtttttgagtgaaaattgtaatttctgcattctcagaccttaagaactaacctggagcaaagatgtcaaaaattacacaagttgaaaataaatcaaatgtgcataaatgtagggcaaactggagaagaaaatcatgacttggcagagtataggcagtctaggaggagaataagggtcaccaggaagagtcccttattaaaaaaaacacaattttttaccatagatgatcattactgcctaaattttccccacttagggtttcatgccactgtgctcagggtttgtcctctattaaaatatacttactctatgggaagatgtcatatattaattcccgtgagatacagagtgatgttgaagaaggaatgctggatttaatgttggggagttttaattaaagtctagccctattagcatgtatgaccatgggcaaggccagttactgaactcttttggagtcttcattccctcatctataaaaagaagatgaaggtggacctttcagggttgttatgagcattaaataagatcatcagatgtatttgctgtctacttacatgtctatcccagtatgaatagtttatccagatatttctgcatgtcacctagcagagtgtagagaaatgagtcagatagagagacactcagtgacttcatgaacgggagacaagattccaaatggtatggtagacagagctggaaacagttgaacagcatccctgctgtgcttggaactgatcagcaagggtgatgaaagttaaaagttgaattacacacttggatgttgctgtaaaactgtctttgggatcttcatcaccaggaagagccatcttaaggagcttctggtcttcagcaactaactgaccgttttcatgttgtagaagagagagtaccagattatactggaacgtctttagcgaatggccaaagagagaaggttttggtacttactacatataagagaggttagccaagcattttgtggtttctcttcaatttttcgttactttttattatcagctgtgaactttttctctaacctccatgcatttactttaaaaattgtcattacatgttaaaatttgacactactatgtcactttgaggtatcatcactcactaatatgtttgctctgcagttcctggggcaagcagtcagagagccagtgctgtcattctggagctgataatacagaaaaacagttcagggacaaataacacatcataagtaaaacaaagaggaggaaaagggccagatttccagaagtggggagaagagcatgtttgaaagagtgtcactagctaaaaaacatcttaatcctctgaactaatcaaaaccctacagaggataaaacatgaacgaaacagagcccttatttcatctaaatgacagacaatggcacagtaacttgagaagttatagtcgttatttgttttttaaaaaatccttttgtagcagtgggtgaggtggagttgttttgtcccaaatcatgctgatacttctgagttgagaattatgcacagctaaatcttaagatgcatctccccccgcaccccaattttatatcaacaaatgagaagaaaaagaaataatagcaagcatgattatatcaaacaaacaatagctgcttttcatcttcctttgcagtccacctgctacccctcaccagcctgcctctgagaggcatctcaccctgcaggctcaaagacagcgccacaccatgtgagggccctgcaccatgatgcgcgactgtttaagcaggtgttacttctcacacttacataaaaaattcagcctatttttgattcttctcaggatttctacttgattttttcacgaagaaccccttctgaatgttaatagaaaaatttatctttaaagtattataaaggataaaacatcattttcacagattattttaatagctttattattagtatcctcattgtaattctacgtttaaagagtgtcattcacgtatgaagccgagtctatgggaattttcctccccttttaagttaaaaaaattataagccatttcaggtattttaccatgatgggaagtgaattgggaaaatgtagctctatttttggagtctcatttttatatttaaaggcattcctgagctgtgcatgttggcagatgtattggtcctattgtttcttactttttataacttttacattttcaaaatggcaataactttttttctagtcacaaaactaatgcatgttcatttttaaataacccggaacatattacagagcttttgtaattcctagtcaatactgcaacattgtcatcagaaatggaattgcccattgaatacctttcacatcatgggggttgattcaataagaaacatatattatcttagttaatcttgaagttgaatatttatttatatatttttggccctttatatttcttttaggaatgtttgtgatctttgtccattcttctgtcacatggccatcattctcttggtttgcaaaagctctgcgtatatcaattatttgtttctctagagcttagtttttaaataaagaaaaatattgtgtgacatggggaaagatctaaacttagagtcagaaaacctggttttatatgggagttttgcctctaatcagtccatgtctgtgggcaagtcagtctgtggccctgtgttctcatctgcatagcaagaggttgaacttgatgctccatgaagttcctttcagctctgctatcatctagtgttggcacattctctcccaattggtagtgtctgtgggattttgaacaccgaaggcttaatttcagtgtagctgtgaaatgttactgcccccactttcctttgaaggattttgtcgtttatacttaaagagatccctataatgttggccgttttaatggaaacttaatgaagggcataaagccacacagatgttttaacctgttctaactggtgatttccaggcattagtaacagaggactggctgtgcatacataaagattggtttgagatttcaagggagggtgagaatagagggaggccctgccaggaagggtagataagaaacactttagtctacaaccctgaaattagagtaggagtttgataacactcatagcagacatggtgggactgtttgtttgtttttctggttcttctgtaaaatggactttccactttaaaaggacttaaaggaaaagtagaggggttgtgttttgtaggcacctaattatttactgtggaagagaggtttaattgtaattacaggatcaattctgatagttttgctgagtggggtttgtgtagtttaaaatactcagagctaaaaaccactctaaaccaaaacatttctatgggagaaactcttcctgccttgcccagactccctaccaagtggtcccatgttatgtgacagttatggcacctctgtgaggcatgtgatggaaaatcctggattcagcctctgcttggcttccaaacagttgatagtacattgtgtaaattgccagtttctagctataggctgtgaggccaattctgtgagtgtttagaagatggacttttgagaaattcagtcatgcccaagcaaaacccgttgaacatctgtaacttctctttacaaagaagtgggaatccttgggagatgctgttatcctaccagtacccatcaattttcttgccggcttttggaaaagaatagttattgttcgtttctttacatttatatactaaagtttgcccaagtggaaaatatcagtgtgtgctagatgcatccatgtaccagaaagggagccatgggatccattactcacattctgtgcagaggacaaaaggtctacttgcataccttgagacagactcctaccaatgcatatcttgcacagattctgtaatgttttgtcctcagccccattctggatggagataaatgttggcctgtcatgtagatgtagagtagaatgtaccaggcttcatttatgctatactgctgacatgctgacttgtgagaaagagggtttcttattttctattggcataagaacttaccttccagcagagtgacctatgagcaatttctatgaaacacagtcatctttctggttaaaatcatactaaaaaaagagtaatagaaactttactttttttttggtagtaagactaagatattaaagtttcattaaaaatttcagtcagtttatactttaaaatgcccaatggaaatatactggaaagtcttcagttggatctgaacaataagaataagcctcctttcttagaaaagactacaacataattttgtagtttaatctttctttcattggattaactggtgttcagatgacctgatattaaatactgtttcccttgactgtattctattattaagtacgtataacatcacagaagaatttgggaaaatagattttaaaaatcaacaatctcattacttttaattttctatactctttttaagtttttaaatatcatttatatttctgatatacatttgctatgagtacatgaactttttgactcttccccttttaattgaaaaatataaattactgacttattgtgttacaggataatctgacttatgtgaatacatcatatctgggcctgaaaaaacataaaatgaatactctaatatttgtatctctctcatcaatgcccatatctgtgtaccctgtgtctttatcttttacataaaatgggaaattagaaatttagaaaacaatatcttgctattaaatttgagggtgacatccataaagttagagtaaaaaaataactttgtggtcttgtgactgagttttgttttttgcttttgtttttgtaccagagatgattgttgaccatcagattgagacaggcctattgaaacctgaacttaaggataaggtgacctatactttgctccggaagcaccggcatcaaaccaagaaatccaaccttcggtccctggctgacattgggaagacagtctccagtgcaagtaggatgtttaccaaccctgataatggtaatgcagaggccagctggctgctgctttctcttacttatttcactcacctttacaccgtctcctgtcatctttgttttaacccttctccatattttttcttttcttgagttcatatgccatagtcatttcatattgacatttttaatccagttggacaggtttgcagtcttgctggaaagatttccacaattgttgtaggctgctaatgccacggtgacttgcttactccatatacatctattctgattgatggaggtggtttagtagtaactctatgatgaaacaattgaatattatagatgagtcagcagattcgtagattattgagtacctctgtgaatatgttttccagcatgtttgccagaattaggaggagaatagtaagatatgataaatgccttgaaatctcctatcacaaagtgtttgcttagtatgtgaaatggtgtccagtctatataaatgatgacttcatcaaactaagcctccatattattttttacctctaataaaaccaatctgctttctgatataggataatgatagatccaagaataattattcaagatgggatattaaccccattatttaacaataagtaaggcactgtatcctatctgtagtttattgatttaccagagtttcctgtagagtgtctatcttttgtatcatggcgtttgtttcaaataaatttcatgattgggagcaatctgagaagggagaggtcagtttccatgaggtatggaaaatgaaggtatgaaggaaagaactactaagcattggctgataggattaggtctatcctcccatcccacccccaggctttttagtgttaagagagatgaggccgggcgcggtggctcatgcctgtaatcccagaactttgggaggccgaggcgggtggatcacgaggtcaggagatggagaccatcctggctaacatggcgaaaccccatctctactaaaaaattacagaaaattacctgggtgtggtggcacgcacctttgtcccagctacttgggagggtgaggccagagaaaagcttaaacccgggagggggaggttgcagtgagccaagatcacgccactgcactccagcctgggctacagagcgagactccgtctgaaaaaaaaaaaaaaagagagagagagatgagtagataagggagattctaattcattgccctcagctgcactttcagaataacataaaaccggttgtcatggaaaaaggtggagtaactgaattgcaactcagccactgcatttctggaaatgagttttctcttagtattaaaggtaactgttggctggaaaaacactacaagcagattttctgtggtatattttttaggcaaaactggttatgtgcaaataatttaaataaaatgctttttattaacaaaaatcacaaaagagaattgaatctgcagtatttctactacagtttgatggttctactgttacctagaatattgctgctgatgggaaatattttggtttttatgtctcccctggctttttttttgttgttttagttgtgtttttggaaagaggggttacttaatggctagaaagttatagaatgagtagtttattataactgatgtcacaaatattttatttaacaatttatatttttgaaattatggcaattaaagttgaagctactcttttatttcttatttaataatccactttcttatgtaagatgaaatcccaatatttgctgatttaattcgtttatcatggggttgggggaagtataaagaagtgaaaaagtgcattgttttcaaatactgctatattttcaaaaagaagtggaatgaatatggcatgcaggaggctttctaccaatatgatgagcttcatttccatggaactgcaggcagagtagaaattaggaacagatggatcttggcggccagaatcttgtgctttaggagaaagtatttggatatggaatacaactaatgagttaatatcgctcgccattcaatctttcatcctatctgtagatctctgtacttgagagaaaagttgaaattgcctttgccatccatcttttcacttgtgaaatgttatatatgctgggcagaaagcaaataggaagggtatgcagttcttttccagctcttcagctgatcagcttacactctgaagtgtggaatatgattagacctttttaaacatgttgttatttgccttaatgctacctaacttcttttaaatatccagaggcaagatttagctttgagagatcctttagcaatgaattttgtatgccttcaaggtacattcttataaatcatcaaatggcaaatttttggctttctagaggtgctcgttattaactggaaagtttgcgtagttacctttatatcttagggtttaattacttaatatctttaaaaaactatgaaatgttctcttagaataaatttctaaacaaacgttcttagaataaatttctaactaaaatttctaataaatggaatgttcttagtttaaatttctatataaaaattatagaattactgtaggtagaattattcctacagttttaatagaccacaatctttcagtctgttgtagttggagctagattctaatatctccatgtaaagcttagataaatttgtatacctttgtctttaatcataggctacaaaatagattcagtgacactgccagctttagttatagctagcaacaatgtaataaataactgaaatttatagagataacttcaaagttgtgaattttttcatttcatggtagtgtactggagtcagctctaatctgctcgggagagccagttgatatcagggatttgcaagctggttgttaaatacagctactattaaaaattaagttatataaacatacaatttaataattatattaaaacaaagataacgaatactgaaaatttattgctttctgcctgtttcactacattttactgtagtctgtgctcttaaggttatttgtatctactgtgtctgtatggtggtagaaatactgttaaatagtgtgccgttgtgcatctcttccctcagtgactatactggtaccttgaaatgggctgttatggtagtatttaccccatagaaaccagcaaatgctataaatcagggcttgatttttaaatttttttttttgaccatttgtctctaggcttaaagaagtgatggagaaaatgctaataatgtagattacatttaaaagtgtaaagtgtctataactgttaaaatgaatagcagaaaaaaattgaagaactttttttcagtaatcaaaaactgttatctgatttaggaaaagagtcagccacatcactgacaaatggatgaagtctgacatattcaatcttcattgtttcacttttgtcttattggttaacatacataataatattaatcaacaaatgtcacaaatatttgttggatatttgatggatgttggaactatactcatttgccagctagcataaccatatgctagctactgatgcaagagtttggccaagatcaactaaagtattgtatgagaatcaactaactatatgcaatttacaatacaatattgtatattttattattatttatataatgtgtgctacatattgttgtaggacttctccttagttcagttaaagacggggttcttgtcacacgaccacgaaaaattaggcttgcacacaatttgaagagtgagaaaaatggaatttattgagcaaaaaggaaaaaaagggaaacagggactctcagcagagcgagtcctggtagtacaggcttcctgccttgcagattgaatcccaggtacacccaggaggaggagcggcccggcttctccaccctgagaacagagggaaattcccaaggctccaccccagtgcgcactcctcccagtgcacaggccggtcagagtttctccaggaacccctctatacttggttgtgacaatatcctttataacagtaaaaatcaatgcatacacatactcacgcacgcacacgttcatgtataaatatggttctttcccctggtaaccggttttcaaacatttactggcacatccactaccagcacactactgtctttattcctaaagactaactctcgtcttttagcatcctggtatggcttggggttcaagacgattttatgtttttaaaaaggagcaaaaaacattttttatctgtaataaatcagggaacagtgaggcaagctttcaaaatgctaattattgtgaaattgctacttgtttgagacatgtgtaaattctatgggcatgcctgccaggtactaaattttaggcaaatgctatcatttctcagtagattaactgaggcatttctataatgttgcatgaagaaattaatgaggttttaggtaattctggtgttggatttttccttacctactttttatttatcactattgttttaggttgaactatatgaaattgccaaaggtaaaattaagttgtcagcaatttcatatgattctacctaataatttggtctgagatacttagctaataattctgtattatttagtgtattatgaaaaagtaatgtttaagcctggaaacattgcttggtagtatttaaaaaataaacatgtatttagtttgctttttattagaaagtaaaagtaaagttttttcttaattggtattcattcaataaatatttagtaagatgtttatgacaagcataacaactgcattttaaaaagttgtggtttataagatgatcagacttttttttaaatgtaccatttaaatgagtactttttatatgtattgtcttatcccaaagcttgcaaaaaatcattgagacctgactttaaggaccaaaaccaatgaggagcctgaatttgagtattcacctttttctacctttgtagaaagttgggtaaagccatcatcgacctgtccctgattttttcctaacttcttcattttttgtccccagattaccataaagatcagttccttgccttccaaggtctgggagtatagatgccctttgctgagaattggctttagtaatctaattggatctagactatggatttcattttcccttaatctaattttacgacctcactttgtattagtgaaaagtttctcttttttcaataaaaaattggaaagataatttagtagttgctcttgatgtctgtgaaagagagataatgaaaagtaagaagaaatgtataaaatgtttagagtggtaactggcacatagtaatcactccacaaatgttagtaaattttatacaatatgtttaagcacaattagggaagaaaaatcttatattgaataggagtggtttctggaatgatacttgctctgtagcttactatttggaaagaaactagcagatatagtgctgatttattccctctgccctttgttaagtgataccaatagtctttcattagcaatgggaggtgaggaagacctttctcatcatagccctcttacgtaataatttgttcccttcattggttttatcttttgctaaatgggtgtcagggggggtcctaaatcacactggaaatccacgacttggtaaagttgtcccatcagggagataaggagctggagacagtggcagctccaaggagagcggctggctcctaggcttcttgctgctttccccatgccttctcctggtgcccgtggtctcctccatatttgtaggcaccccgggcctgctcctgatagaacctctgcatcttatcttcaatttaccaccattttcctcttttttaattcaaatatgagaaatgtaatccacttgctcccattatgggttgccactacttactcctgaatctggactcctctgtttaaggttatctgccaggtgggatgccacttcctagctgtctcccatattgctggtttgatataaacacacacacctttaggtatttttaaaagcatagtctattgctgttacctacagtaacagataggtggtttgcaatgcagaacaaacaatggaaagaaatcaatttttatgttaatagtaattttaggctccagtgaaatataagtgatattagttgggctcttgctgcattggatctgatttgagattaggcccattcagactatttggtttgatattagatccagatgccttgacactggcttattttggatctggctgggaccaccgccaggtctggtagctttctcgttccctttagaaattcttcactttttgcctgcactttggattccagcttgcccatttgtctcaggctgggttgttctgctttccaggccatccccccaactgccccatacccttgaattcagacatggtcccttaatcaatgtgtaaggcagatatttccctaacctgcttctgaagccggccatcatgcttctctagttctcagataggtcagttgacatcttgcaactctcaggcccacatcacctgaaggttagaatcctcttcctatgtgcctttctgcatacaattaactctttcccaaaagcaacagcatacatccacctgttttgttcaggactctcattttccgttcattttcatagcacagatgaatgtcctgaccagaacccaaataacgatcaagctctttcccacctgagaataaatgaaccgatctatggaaagttgctagcaaagtgcctgaatgaaatcctcttccttaataacagtaattattatggctattgttattatggtatttctaactcattcatcaggcaccattcttattttcttattttccttttctttctccaggcagatgactgattttccaaatgcataatgttcagatctttaaataaacaacacatttttctccaagggtcaatctctctcagtatttgctgacctattccactctttatagcaatgaagagttgggcttaggagataaaactcaagtgggtctttagttgtttgacattgaaggcctactttgtaatcttctttttaaagacatgggaccatcatttccagaggtttcattcaattctttggcaaatgtttagtagcattgtggttatgagcaatttacataatctctttgagcctcagtttttatatctgtaaaataagggtagtgatgtcttattctgtgcatataaccaggaataaatgagatacctttgtgaaaattattaaataagcagaatgtgagataccattgtgctttggtgcattcatactgccataacaaaatagcttagattgggtaatttaaaacaatagaaatttattgctcacaattctggaggctggcaagtccaagatctaggtaccagcaaatttactgactggtgagagccctttcctcatagatggtgcgttctatggatcctcgcaaggtggaaggggcaaacattccttcaagcctttcaggagagcaggaatcccattcctgagggtggagctctcttgacttaatcactttacaaaggcttcaccttttaatactattgcattggagattaggcttcaacagaagaattttgggggggatacaaacattcagatcctagcacactgtaaggaacaattattatccagaaatattttagggggaaaatttagtgactttcagctttaaaattgaggacagaacttcaattcactaccattattttgcattttattattttctgtttctctccattttttgcctactacttcatttatacgaaaatattcttggagttttatttttaaaatagtgctactttcattatctactttgcagatgccaaataatacataatgagttgtcactcatgggctttctagtatttttaaatttagagtataaagattgatcattatgtctaagtaatgacagttttagctatcaagaaataatatgtgtacagcaagatgttaccatgtaataaacatatttttaaattttactagttgtcagtctgttttatacatctagggtctgtgagagagtaaaagaactgaaatgattctctttgcgtttatgctaccacatgtgagtgcttttttcttcattcccctttcctggagaagtcatgtatttcaaggacactgaactggtttgctgctgtcaaccctgagtaaatcttcttccaaggcttggtttccttaatagagccacgcttgcaaagttttttgtattcccaagccccatgttgctctgggagcaatcgaagtgtaggtgcagatctgggaccacatcctgctccctgtgaaagagatataggagagggaaggacagggaaaagtaaggagagaagggtaagcaagatagagacataaaatatgagcaccatgggttcatttaaaggaggggataaattaaggtcttccaagaatgactaagcatgcctcattctactcaactcctgtatccatagaaatacaaaggacaaaaaggagatctttctaggtttgtgaacccaatttcttaaaaaccacactttgaatttaaagtaggccaggatttctgtctttagtgttttccaacactcttcaagatgttgaacaaagaaaatgtcattccattaactatattagtagtagaaataagaataatgcctcacattattatggtagctctaatgtatatatcatttcagatgaaaaacctgaaagtcagaaatataaataacttgtctaagcatagtaaatggaggaacccagtgtgcttaataatcatatgctaattcaaccacaaggggatgagcttcctcaatcataatttatttcccacacatcacccggtccaggtctcatatgtaataatgtgatggtgaagggctctggaggccattctacatctaagcaggaaaacacaccaaacatggcagacagatgattgtctttattggctttccaaatggagatttctaggcaacatgtttcatgtgtttaggtgaaatgctggtataatcttgggttaaatttcttgtctaaatagcagtgccgagtgcataggaagcattcaatgactatttgaacatatgatgttgcaatcccaaaagagtcctaaaacttcaccatgaataaaatttattttcttcttaataggattgttttaaaaaaagcattttttctggagatattgtgtgtgtgtgtgtgtgtgtgtgtgtgtgtgtgtgtgtgtatctatttgcttgattcaaaaagagacaccttcacatgaacagatttaggattgatggttttggacaagttgattctcaaggggaatgtgggtcatgtaaaacaatattcctcacaacatctttttctacagtctaaatattggataccatcactcaaaagccttcggagctatatctttcctcatcagattgtggtaatataaaccaatttctaccttgtttatacctgaagtcaggcaaaagtgatgtaaagagaatatgtaagataatagcaaggctaagctgtttattttgtagctcaagtgtaaaagaggtatggtgaaagcattgtgtagacaaggcatacataatatatcattaccatggtataattacagaaagttctgctctagctttgggaacgacttctcaaaatttgatatttggagttaaatttgtgaagtgaaaaaaagcaacatgaaagggttacagagtttatatctcctcctgcacagaagtacacagagggtccaacaaatcaaaatgtagacatttgccaatgtaagtaatggatgctgtgcaagtctcagctttcatgagggtaagctgccagatggctccagtcaggctttgctaaaacacaggtgccgagtctctctgggcagttccattttcatgcctgtctttggagccaggttctttgctggcgagtgccaggcttcattccactgtccccttgatggtgaggctctgcctcaatggaggctgtatacgcaaaaagaaatttccagctttagttcccaacaatacactgacaggttgaggggagtagaggagagagaagctgctggggaacgttagttatcagcatgagttttggagaagctgctgacttcctctactcacgttagaagcaagccatggtatcagtgataaaatttgggtacctacatacacattagaagctaaaggaatatgaattctcattctaaagaaattggaagctaaaggacatgtcttcttttgaagaagtttcctttgtattatcagcttctgtcagttctcactgatctggcatttcactgggtccttgcttgggcctagataaatgtttgccagttgtttagcctaattcatttaatttagctaagcctgcaggaatattggctctttaagcagatcacttagttgtcaaaagaaataggaggcaaaacttggccagtatgataatatacatttctaaatgtctccctcttaacaaaagcaatttgggaacaatctcaacccattcatttctctttttcatttttcttagtgcaataaaaagttgcaaagaacttcaattatgggaaacaattaaaaattcagattgcaaagagaagacatcagatttgcctcaaacaggtgctggcacagatggcctgctcacaagtcctggctttatttacagcttttaaacacagacagataaattgacaaaaatgtttctcgattttataatgtgccgaatgcccaaatttggctataaacttatattaatttgtaaatgattcactttaaaccttgacctcccaagtcatcagtagccttaaaaagaccatttgtctcccctgttgtttgcatacttatgtgaatagattatctcatatttgctgttggttggatatgccttgtttactgccttgatcatttaatgatgatctttattaagtcaaattgcatgtagtctgatggctagatatttccaacctcgttgtgattccttaaaggataattatgccgtctctattttactagccttggagcatgacatttaataggaatagcaaaataaatgacatggagcccaaatgaaactatcttcaggaagaagttgatggtgttgtttcctccaggtgataaaatgtatctggagaaaccatactgtatatgtagcctgcaacattatttaatctttgctgtggtctaagatttggcataggtgcaccaaaggttaaaatgttaaaattaaaagtgagtattaaagggcaccagaaaatgaggactaacatacatccttaaattggcttatattaaggtattaatttatccctaccccagtcttatgtttctgaagggctgaaaaacagaggaaattgagatccagctctatattcatcaaggaaaatatttcagaagtgaaagtatgaaatgttgctttctccatttgtgcataagatccatagacctatctattgagtaggtcataagaaagctgcttactaatacgacaccctgccccctgtgctttacaaagctgtgtgtaacttcgctctgtgtgtgcttatgtggttcataattattaacaatcttgatcttacatcctgagattagtgtttattatgtaaatctttcttcttctgaatataatttatgttttgtgtattagaactgcagggtggatcatccattggtatttggggaactataatgattgaatgtaatttttttagactttttcattctttgtggggattcatttcatctaagggtgcagggcatgggagggagtgtgtgtctttgtaatgtgtcattgttctcctttaacccgcttgtgtgatttgctttagcatttttttcttcttaattaatgcttccatcctcatccttgctgtggctgctcatgtgtcctcctcctcctcctgtcttctgcttctgacactaaagtgcgcagcccgcttgagaactcagtgccctgcctagcaacccgcaccttggatgatgacccccgagtgcggcgcactcccagcgtgggatggctaagtaagtcaatggctggggaaagggcaaggaaggtggcggtggtcgggagagggagggcaggaagatcgggctcatggttactgagtggagggaaacctcaagaatgcctgaaagtgtaagatgtaaatattcctaaagtcgtaattgctgacttatttcttctactgtcaaagagtacagtaatgaagaacttcctgggtgatctgctgtcctgaatccaagttgaggacattgtaaggcagtggaaggattgtgagactaaggggtggggctggcactggcagccctccctccatgggacacttctctgaacctcagtttcctcatggtgatgctgaaccttcttacttcagaggactgggaggaaggtcactggagatgaggtctctgaaggtggtttgaaagcattcaagtgctaagtaagaggaagagcttactaagttaataatgttaaatacctcaaatacctactatatgccagaaagacagaatgggctatggacaacaaaaaaggggaataagatagaatctttactttttaaaaatttagagcttggtaaagtgacaagatttatgtacctaaaaccaaaagagaacatgcacaggaagctacatgcactttcccacaggtttctaaactgagtatatgtgatataatttttttaaagtagagtattaagagatgaataaggtgattccctgtccttggggggtttcctttctaatgaaggagacaggacataaatagataacaattgtataaaatgataagtgaaatgaatgaaaatacatacacacacacacgattgtgagaacatacccttggtctgggagtggcagtaatagaaagggcttttagagcaggtgttttctgagctaaatcttaaaggaaaagtatgagtttgatatatccataaaatagaaacttaataattttccttgaataataaaagttacaaatactaaatactttatgttatgctatttaattttctgaagaatcttgtgaagtggctattgttattacccacatttgacagatgaagaaattagaaaggttaagtaacttgcctagatcacacaggtcataagtgtgtagggcaggacttgagcttcatcatatggtagtttcaactataattttatgggtgatgccttactgaagttaaagtataggaaacttacatggtcagattgcccaaaagatctgctaatcccacaatgaagctctaacactcacatgattctctctgcaagaatcaagcatttcttctaataaattcttttactacttaatgatgcctcttggggaaaaaaatttcaggtaaaaagtttgggccttggagtataaagtcaggcaggaatgggtctgaatcctggatctaccactcctggcttcctgactttgggcaaattactcttttaccgtaaacctgggtgtttcaaccaactataaaactgagttaatcttaccaacataggattgttgtgagaattaaattagaaatatctaaagtatctagtgtagtgctcagcactcagttaatccagcattactgctgatagcaaagttcttatagaaattgctcaagaaattctagctgtttttatttttttaagtttcatttattccatgtcagacatccagacattgaagtatttttgtcgataaagtgtcaaggaaattgaccaaagtgttcagtttgcggatgatatggaaatatggcagctatttggaaatcaacttgagaccaaaccctggaccaatccttctgagaaacacattttagtaatgagggaggattcttctcattgtctctttatgtgatgtaatctctccctaaataatcagctttgatgtataatcaccttccctagggcttctaatacttactgtatccattcagtaaatgaaatagacacctagtgaataactaaggtgtgcaaagtagtgttaaatactgctggttttacctacctattcaacctcacttttgtctcttctcaatataaactctaatcagcttgtctcttttcttttgtcctatatcatggaaaatcctacctccatgtttttgttgataaactctacccttccaggaatgccttttttttttttttttttggtacagtcttgctctgtttcccaggctagagtgcagtggcttgatctcggcttactgcaacctctgcctcctgagttcaagcaattctcctgcctcagcctcccaagtggctgggattacaggcgcccaccaccactcccagctaatttttgtatttttagtagagacgggttttcgccatgttggccaggctggtttcgaactcctgacctcaggtgatccacccgcctcggcctcccaaagctctgggattacagatgtaagccaccacacatggcccaggaatgccttttccagtatacctatccaaaactattcagtaggacctgaatgaagttccatctcctttgtaaaatagttcttataaacacagatcttttcaagtcttaaaattccataactcctattttctgtgcctcacaatggaagatttaccatatattgtcttacgttgttctctgatgtttcattgtctttattttttcatttcaactatctacataaaaaaaagccttctctagggtctgtatctcatgcttttgtgtctcctctggtgcaggtacttgaaacaagggtgttgtacaatacacatttgttgacccttgatactccatcatttcattaaaagcaaccaacagcccagttttcactagggcccatcttggtcaccagaaaccgttaaccaaaagtgaatatggtttacttgtaaaaactatttcaccatatttctgcatatcctggtctgatgaatttgattatcaatttattctaattgttaacatggacttaaaaaactgccagaatattagctaaaaacaaatttgtaacaaggttttttaaagtttatctttaaagattttagcaagatattttcaggcctaatgtaactagaagttactaactacctttaaaagcttcatttaaagttccttttaaggagtaagctctcatcatttttacattgtgtgcttcttatcttcattgtcacctgaggcagatgtgagcctagagctcttatccatttcaaatgctgccaaggtattgaattagaatttggaacaaaaccaaaaatgatttcctcttacagatctcaccggcaggcctgaaaccagcctgggctggggaaaacaaagagaagctacttttcaggacaagttaatacccacctaaatgccttgccattattagagcataagaacataccctatcttgctagatccagaatggcttttcactcttagcgcttatctgtgaattcagtttgacatctagcagccagcatcatctgagcccttagaaaacacttgtgtccttttgcatttactggcagtcgaaatcagctgcttcagactctcaggtctgaacttcaaagaagaaaaggaggttcagagtttttttctgtcatcttatgcacattcctggcatctgccttcaccttgctttgtattttacctgtctagtttgtccatctactgggcagggacctggtccagttcagtgttttgctttgcaagtacttacccagtgtttaatgttattattatcatcccaagtattagtagttgtaatactgttttctttgttttttttttttatttaatgaaaccacagtggtataactgtagattcttgtttcatcctacaatcaggctacacagttaacattagaatttaaataactgaattgtaagtggacatttttttgcttttaaaaatttttctttgagcatttctggaattaaacaattcaaaatcttttaacttttggagagtttactgactaaattaaaattacataatttttctctggctctagggtcttcataaagttttacttctttaggaaaatggtgaacccagagaattcactttaacaagttcaattcaacagctgttcaccaagcttccactcttctagttatatggtccaatcagagggaaggagataagggaaactcacaaataacaatcatttgagagaagctatggtaagtgccaccaggagggtagggggcagactggtttgtctacagtgtgtacaacagtagcatttattatactctctgcaaatactaattagaagaatgaatggtggggtataaacagagaattgggaaaagaattcttgggagagacagacttttcaatggaccttatatatttccgtaaatagagattgtagtaagagcagggtgagacattgaaagatcatgctaggctagagaaaagtaaaaaagcaaccatgttgttgagaaagtataaataagagtttgtatgaggtagagtgagttgatacattaaattagcagaaagggcatgggaagaagatgtgtggagctagagtggcaaaataattgggccattttgtggaaggtctatgaaagtttttagtacggagatagcatggttagaactttatgttagggaaattaacctgtcagtcattctttgagtgggaatcagttaggagatgatttcagtagaccagtgctggaaaaaggatttaagctaggattgcgactgtggaagtggaaaggaggggataatgcaagaaatgttataggaatggtgttgtctagactcaataactgactgaatgttaggggaggaagagaaaggagtccaggatgcctcaggaggtagcaaccaggaagatcataggaaaccattcatgggcacaggtgctgggtttacagaagcatgacagttaagatttctgctcccatcatacgtgttgtgaccatctttgaagatatgtttcactagcagatttttaggttacccatcatgggccaagactcttctagattcctgctttgttatcacactcttagcttggtgtttttttctcctaaactttcttttgaggtggagaacaaccaccacatcacaactctctttattgcccagtgaattttgagcattcttatcttgattccaagcatctcactttccatccctctgtttttttcagatgcagacttgtttttgaatggaaatattatttgggtcacttattgtaccatttccacgtatatttttggcctttaaaatctaaagcaattccaagtacaactttaaaaattccttcactgtagcttttcatagtcacaattttcaaaagattgtaagaaataaaatctttcagcaacctgatgtctatgttcagactttttagttaacgtaagacattcagaaattgtatgtggtatgcaagaatgagttacaacattcttaagatacaggcagttctaaccactttttaataaaggaattagttactgtttatcctgaatttatgaaaaacatatcataaattatttccttgatatctaatattacatttacaatggactaaaatatattatgctgactttagacaactataaatagagaaaatcaagatgagagaataaaaacgtagaaattctgttatatttcagaatactggggacttggaggagatttcaagaggcacatatttggaaaaacgttggcagtctgctaaaattgtaaaacagttttttttttttcctaataagattttgggatttgtgaggattcagacttgtgcttgacaaaatggtgatatgtgtgatatatttataatcagactctcctgctcatcaccaaagctgtctgttttccaaaccttcctgatccttaccatctttctcccttctttcggacttggaaccttagcgtcaactttgattaatgcaactttgattatacctccagtataccactaaacctgttaaatgttacctccatattgttgcttgcctcagtctcctttccagtctgactttccttgcttttgttcatgtccttatttccttttgcttagtctgatccagtagcttgttttctggggtcagtggttatagttgggcatatggaaacgcatcttacactttgttccagttgaccttatcatacctggctgataagttacctcctcatgtggaagtgttcagtggtacctgagaggatctcaggcaacctccaaatgcttgagtctggcattcaaggcctaacccatagtgaactaaagttgattaagtagtatttcacacatctttctgtatttgcctttatctatactacatttcagcagtcacttcccattactagaatttgctggacgcttagtgcctttatcctgaatgatttttccacttggaatattcttcttcctcctgaaactttctgttaaaatcttgaccatccttcaaggcccacattctccttgaaggcttcttaacttgaggtgctctttactgaccttgaactctgatccttttctgagactcctcacatgacatttatctcattctactttgcactataatgtatgagtacatgtcttattccctttactagctatcaatttcttaagggcaggaatgtgtctgattcatttaggtatcctttattgcagggattgacaaactgtggcctatgtacaaaatccagcttgccacctggttttgtaaataaagttttgttggaataaagccatgctcattagtttatattgttgtctatatagctgctttcatgctacaatgacggagtagtggcggagatcatgtagcctacaaaacctgaaatatttactacctgtcattaaaacattttctgacccttatactgtagtcctgattctcaaagtaggaactgaagagccctaagtgtccctgagaccctttcaaagggattgaaaggtcctaggattttcatcatgtaattcaaccaaaactacatatatatacatatatacacgtatatatatatacatatacacgtatatatatacatatatacgtgtgtatatatatatacgtttgtgtatatatatatacatacacatatatacctgtatatatacacacacacacacacacacacacacacacacacacatatatatgtgtgtatatatattttttgagacggagtctcgctctgtcacccaggctggagtgcagtggcgcgatatcggctcactgcaagctctgcctctcgggttcacgccattctcctgcctcagcctcccaagtagctgggactacgggcacccgccaccatgcctggctaatttttttgttatttttagtagagacggggtttcactgtgttagccaggatggtcttgatctcctgacctcgtgatccacccgcctcagcctcccatagtgctgggattacaggcataagccactgcatctggcctcctaaaatatattttaacaggttgaacacagaagcagacaagaaaatccaattgtgtgtcatttaatcatatatatatatatatttaaaatatatatatgtttaaaatatatatacatatatttaaatgtattttattatttatttttgagttggagtctcacttactctgtcacccaggctggagtgcagtggtgcgatctgtctcactgcaacctccacttcttgggttcaagcgattctcctgcctcagtctcccaagtagctgggactacatatgtgcgccaccatgcccagctaatttttgtgtttttagtagagacggggttttgccatgttgccgaggctggtctcgaactcctggtgtcaagttatccacctgcctcagcctcccaaagtcctgggattacaggcgtgagcacctcacctggcctcatttggttgtatattaaagagatttgtaaaaatgtgaaacagtgcctttctttttatgaaattttttgtttctgaaagtatagttgtttttcataagatatacgacttatgttaacacgcaatggtttattgttaaagtgaattaatgaataaatatttaaaaatttttagttttaattcctaatgtaacacgtattgatagatatgacccaaataaacagaccctcttaatatttaattgtgtaaaggtgttctgagaccaaaaagtttgataactgctacttctttgtgtctggcagaatgccttatacatagcagtaaatcaatatatgctgaatgaatgaatgaacaatagaaccagatggttcaaatcaggaaataaatgaagtgtggtggtaataattgaaagtattgaaagggaaggttaagagtcattgagaaatgatatctactatgtgtttgtgactgtgattcctctttgttctcccagagaacattgatgagggatagtggagtaggaatggttttgttggggtgagaggaagagcaggtcttcctgactttctgtctttgctggtttcatgacaagtcatgaagaatgggctagattttgctatagtgtgagctagccccaaacatctgtgtggcctaacaacacagaagtttctttcttactcatgctactatatgtgtaatgtggatcttcaggggtctctgctcatcattgttagttaggatcaggctaatagaagccttctctcatctgtgtttccacagtcaccgtagcagtaagcaagggtcatggtgactcacaagctgcctcgtaaagttctgcacagaaataatacatcatgtttgtgtatatttcatttgacatagtgagtcatgtattgtattagtccattttcatggtgctgataaagacatacccaaaactgggaagaagaagaggtttaattagacttacagtttcatgtggctgggaacgcctcagaatcatggcgggaggtgaaaggcacttcttatatggtaagagaaaatgaggaataagcaaaagcagaaacccctgataaacccatcagatctcgtaagacttattcagtatcaggagaatagcacaggagagaccagtccccatgattcaattacctccccctgggtacctcccacaacacatgggaattctgggagatacaattcaagttgagatttgggtggggacacagccaaatcataccatgtgtccacatctcactttgaagaatgattatgctaccatgtgccctgaaggtggagattcagaaatatttggtgggcagcactaatgactaccacccagtcacaaaaggaattataacttgactttggagtgtgctcttcttggcaaggctgagagcaatgtgaagttatggaaggccactgtgcagaaaatctcctgcatactcttacaatggaggatgagggcttttcacataatgagggagggttgccagttcaaggtctactgaagaactggtgagactgtggttttacaggagacttctgaagtatactacattaatttgaaactgatagacagtctttcatgcaaatatacagtaaagcactcttattagaccaaacaatgtctggatttaatgattggagacagctcaagcgctaaatacttgaattcgtttgtctgtgcacatgtgagtgagagagacagaaggaaaagcaaatgcagtattccagctacagatatcaatttcaaagttaataatgaaatttctttttggcagcaaactgtcgaattttactttgatgaaaattgctggcaaaatcttcagaaacgaggcttttctttccatggtaagctgaatatttattgtgtttagacttgtcctggtaattcagatctcatttctactcctcttaatgcatcctccacctcaatagatcctcattcatccccttgtcaggccaaaaagtccctgtcatcttagacttcttcttgcccttcaccctctgtacccttcagtaaccatactcttctgccattttacttctgatttattcccacccttccttgactattacaactgctctaattcaggtttttatcatcatctcttgtgggaccacttgaatatcctcttgttttccacgccttcactctgacttcttaaaatccatctttcacaactgccagaaggatctacgttatgaacgccacacatcactccctctgctcaaaaacctttagtgatgactctctatcatttttaaactcaggttcatgttccctagcctggctaatacttataatgtcaagcctgagttctctagcctgtggaatgcttttgaacttggtctctgcctaacgccctaatcatctcttgccattcccactcttgtactacaagctcttgtaatttagatttctatatacttagatcccatgccttgcaatctctctatcacttattcatgctgttccaattgccccctcttgatgtgactaaatttaacctatccctaaagctcttatgtcccgcaggagacttttttcataactctcatcatctcctcctcctcccatcgcactgcacaaataactctcccttatttgtgctctcataaccccaacccccttcccccattgacttatcattatacaataatacaaatatgtttccttcatcattggcaaagtatctaaagagcttgagcagaacccattcagttttgtattcttggtgccaaacataatgtcacacgcttagacaaacattctgaacaataaggtggttccatttttgtttttgactattggacaaaacagagtttggagggaacgatgacgaatttctcaaattcatctagatttctttatttgtatgaattagttttttttttctggtggtggtgatggtgatatgtggagctgttactgggccacaaattgtgattcctcttgcatagattggggcttttttgaagaaactgatttgttcctcatccagggtctaacatagggcctgatacacagacacttcataaatatttgttgactaaatggacacttaacctgaaagggagagaaaagatgaggtaacgtaaacctagagcaggaatgatttttctaaattgatcagattttagtcttcatatcgcccaaaaaactgaccagacacagtgacatgagggaagctctgctgcttttctgtggctgctgatagtagtagaatttgagaattagattctttggttagggccttcgtttcttactgtctagatcattctatccatgactgagatatcacaaacagggcaactatgactactccagctatcatttattacaccagttcccacaaaacatttctctgaagtaagcatcactcactccttattacagatgaaggaactgaggctcagtgaagttaagtatttatggtagtcattagggctattcaccaatattccaggtctgtctctttctgggcaggtatgaggaccctacgtcttcaacccacttgaagttaggtgtgagctcatgactttctttggccaaggaaatgtgagcaggagtaatagaggtcatttcccaggaaagctttaaagagaatggctgctccatgcatctgggtcctggcctgaggacataaatgcagaaccaacccccagccaatccacaatggttattatcatgagtaagaaataaatcactggtgttttaagccatgagaatcaaagattgttctactgtaatctagcctatctgacacggagtgtttgaggtcactcagttagttggggggaacagggtttgaacttgggggtttagactccagatggcacatttccttgctattcctccctctgcttcttgttctctctactctcaggtttccttacttccagccacagatgctgctcttgtctgctcataagaagtgtagacactgatgagtcagtattttactgtttcaagtcagaaaatgaaatgcctggtgtttctcaatgaaggacaacaagtcggcattctgaagtgtaattttctgcaatggttctgttttctgagacccattcttatcaatcccaggaaacagctggagcacacttactattatgggctgtgatcagcttttgcctcagaaagagccattcactgtgatgcaagcagtaaccatggttacaaatcgaagtgcagtcttactaggtgaatgtagcagagattcagcatccttttcgaggatgaagaacaggatcaattcaactataatgacaagcttttccatctgtaaatgtcttgctttaaaaatcgattcttctagcacacatttaagctagggtcttgattttgggaattgctgtaggtttcaaggttgaattatttctccattttcctgagagcacctttgaataatttttgtctgagtttctagggaagtgtctagagcctgtaagaaagtggcacttcctcttacccagatagtggctcaggttatatttgttattattataataatgaccaagagagctgtgactgttgtcttcagtaacagtgattatcgtaacctcagattgggaagattccttctccctttagtggcgataattttatcatacccagttataggggtagagttttggggagtatactaattcattcagatcatcaattcattcattcatttaaatatttttgagtactattctttgctcactactcagctaggtgctgggaatttacaatgattaaggcagacacagtccctatcttagagagctaccagttagacctttttttttggagacacgtctcgctgtgtcacccaggctggagtgaggtggtgtgatcttggctcactagactgtttttgtttgtttgtttgtttttaaccaaggaacaagtgatgtttatgataactggactagtttactggataaagtggagcttatcctgaacaaagtgagaagtgcttgtagagagagtggttcacatctgaaggaggagaatgagaacgtagagaccgtcgaggaggtcgttaggtagtgagagatctagacatggccataggagtgttgattaaaggaactggagaaaaggcagcttagttagttcatgagagctccctcaatacaaatatttagaggaaagtagactttgggtgatcattttagtgaagaagatattttattgagactcctgatgtttttggttaaggagtgaatgtaatttttatagttcattgattttccaaaaaaaaaaaatcaatgatgtgatcgaagttttagttttcccagtttcaggctggcgaaggcctgttggtgaggatatagtcctcttatatgaggaagcagggttttttcttcaaaggacctttgtacactagttttattgggagggatgaggactgcagggaccaatgagggccttgtcatgaacattctaagctaagcctgggaacatatgaagacatacattatttctaaggtgactaatagaagctatacatatttaagtgaaaactagctttttctgagcatctgtgtacttgggttggcactctgaacacaatcctcacgctttttcttggtctgtgcaaatgctactgcttacctgggatattgaaacagtttaccacataaaaatgagctttattaaaatgaaatggatcacttcattaagtggcaggcttcctgtcactcaaagtatgtaaatggatattaggagactggctatgtataatgttataggagggaaactgcttggatgagaagttggttagatgagttccagttgccctttaactctgtgattctatgagccacatctacaacatacccagtctccagagaacccaccttgtggggtatctaaactcattgttccactgtgttgtgttcctggtccagagataatgtacaactgtgggaaagttctagtagtgctgtactgggggaatttctgaagccaaagttttgatactgattctgatatgaatttctttctcattctttgcttttctctttaccttggttcagcagaaaatggatttttttaaatgcacctttgcccactggcttaagcaatctttaactagtataactaggcccagtgaagcattcccacagctttttttgcatggtgattcatatattttaccacttgctctttttttcctaccgaattcattctccacactgctttagtagtaaatataggaaagtatatattgccttcaaatcagaatgacagatactagaatgagctaagaccatactttcctcaagagaacattagaaattaccattaaagaactttctatatccgtgatgtatatacataagtaagcgaggtacttactgcattgatttcttaagtaaataattactaatgacctatgcagtaagtgagacatctaacatttttcctagaagctcttgtattggtttgcctaaagtcatcacataccctctgtatgatgaataacaactacatttaggtctcactccttatttcttaagtcagctcaagatttcaacccccacctcaggatatgaattagaactgcaacctctcagttctctgaactcattttcttagactagaaaattacaaatggtgagtatatgggatcgcaccatggcaaatgtagtttactgtttcgtaaggatcttgagttcagagggatttatgcacatgattacagggcaaagggaaagagaggaaaactaacatctattgaacagctgagcaagacacttccacatgtgtttgcttgcttaatccttatgacatcctgataagatatttttatttccattttactaccttttcttattttgtcttttttcatgatattaataacatattggcataattctttttatatatgtctttatggatccattaggcccatccagaaaggagacgtgtgagccaccatgctgtcttctcctctactgcccccgctctgtcgccttccagtcagaaaaataatgcctgtagcaggtaatgttaggcaggtctgtgttgcagagccaaatatcttcaccaatgagacttcttagaactagataacttgatgtaatttaggagtagcacagtatcaaccaagagctgcaagcatctcagttcagcttgggcttttcaataagaaggaaatcctgtggctgtcatagctctgaacagaattttccagagtaactctaggatcacttgaggtcctgaagctatcacatcatttggaccctagatggcactttagctgaattgcgtaattaatctctccaagggggagaaaatgagtatatgagcaagtgcacaatgggacaggttgtaccctacctctcttctttctcagacttacagcactttggtctacagtgtcttcagggtcacttgggtgaaagaggcattatgggtccagaggtgtttgtgctcttcttttctggaggctactgctagagttgtgggtgtcctatagtcattgattgctaagagtgtatcacttaaatgaatgtgcagtcagcaagacctgaggagtttactgcatgaggaagccaattgaatggccttttcccaagtcatgttttgtgagctgtaaatctagagcagtgaggagggggcttgaacccaggaggttgcagtgaggccagatcacgccattgcactcaagcctgggcggcacagcaagactccgtccctcccaccaaaaaaaaaaaaaaaaaaaattacctcatttgtacacctttttccttcaaatacatttgtattattatttctaatccattattaattgcatttgtaattttaagtagtaaacctatgtctctattttttataatttgctacaaaaacctatttttgtagcaaatattgacagggtcttttgacttcttaccttgtgaaaaaaggatgtaggagcatcacacacagggacctgttggggagtagggggttaggggagggatagcattaggagaaatacctaatgtaggtgacagtttgatgggtgcagcaaaccaccatggcacgtgtatacctatgtaacaaaactgcacgttctgcacatgtaccccagaacttaaaagtataataataaaaaatttaaaaagtagaaaagaaaaactaaaaaaagaatgttagcatccctactctttgctgcccctctttttgctgcttcccttctagacttctgtcattggtgcttgtactttttattgtcaatataggttagatttatatatatatatatatatattttttttttttttttttttttttgagacagagtttcactcttgttgcccaggctggagtgcagtggcatgatctcggctcaccacaacctctgcctcccaggttcaagtgattctcctgcctcagcctcctgagtacctgggattacaggcatgcaccatccgacccggctaattttgtatttttaatagagacggggtttctccatgttgatcaggctgctctcgaactactgacctcaggcaatccgcccacctcagcctccgaaagtgctgggattataagcgtgagccatcacgcccagcctttagatttatattcttgtctcttatctataaattttgtgctttctctatcagtttgttctaatgttagaaatacatgaatagaatttatatcattatgactatatgaatatggtttaccctaaagctgtgtaatgaactgtaagtacattttcttttgggtagtttttcttaaatatggagttttagattgcattttaaaaattgcctattgttactacattcctaagctctttcaatatctcaaggatactgatacacctatggaatcccttgatatctccttgcagattcgcccctcctgttagctcctctcttccctatgttgccctcctgctttacgagactgattgctttccacatcactgcacagtggacattctggcattgactttcattgtcatcctgcgttggagaccatatatctctttttttcttagttaattccctcattttgcttatcacactgtcagtaactttgtataaaaggacaaattaaggttaaaattttttggagtttttttttttggccccagcttttctatatatatttttttcatgctcaattgatgatttggaagcatatagaattctttattgaagacaattttcttccagtcctttgaaatcatgttcccattatcttctaccattctgttttgcttaagagaattccaaaatctgtttcttgtagcttttcctttctagatagaacacttttggatttttattttcatccttagtgttattaaatttcacaatgattcatctgcatacaggaatttttaaattttttttggtttattttatttttccctgggtgtccttgtgatctgaagaaatatgtcctttatctttggactcttgaattctctttgataatgttctgggatattatattctctttgataatgttctctctacaattttccttgttctggcttagtagaactcctaataatcagatattggggttcctggacctcttatctattctcttatgttttctggctctttgccccttcttcccatgctctttggaaaattcttgttataatattttctaacagttttattgaggttttttcttttcttttttttggctgtatgtataatctcatacatataggttttaaggtaattattggtctaatctaaaatcttttccttgttctatttttcatagcagtctcttcatgttttgtggatacagtatcttcttaaatctctaaaaactaattagaacttttatttcaagttttctaagtgatatttcttttttggaattcttttgcctgcttttttctttaaggtatgggttttagtctttgacttcctctcttaaaccactgatggtgctcaattgtacatttgtacttaaaaaagaatatttgctttaatgtaagcaggaggcataattctgaggggtgctctaagctcaagaattcagaagactttgctgtgagatacaaacacctgtgctaattgccctggtcttttctggatacttcttgagcagagccctgcagtgtaaatgctttggcttctgggtattctgcccaatggggtagtgttatactttcttgaatccatccctttccttgaatccatcctttttagcctgtcccttactcctgcctccattgtacttggcagattccaatgtgagtttcttcagagttttgcagggaagatgttctcttttttaactccatgtccctctgcatggagttttacactgacatttctaaatagcataaatggtgtcatgttctactattctatctgctcttcttcttccagaaagtttttggagtctcttgtctatgctggtcttctatctgttcttttcattggtgtggctttatacttttgtaaaaagtgtttttttgtgaatctgtcatttttaaagtatctaggaaggttgaagagataaacccagttactatgtcatatactaagtttaccattttgaagtggtaccctacttcaagtatttatttatttatttttttgaaataaagtttcactcttgttgcccaggctggagtgcaatggtgtgatcttggctcaccacaacgtctgtctcctgggttcaagtgattctcctgcctcagcctcccgagtagctgggattacaggcgtgcaccaccacgcctggctaattttatatttttagtagagacggagtttctccatgttggtcaggctgggctcaaactcctgacctcaggtgatctgcccgcctcggcctccgaagcgctgggattacaagtgtgagccaccgtgcctggcctaaagtatttttaatttggatgcctcatcaaatcagagaattcttccactcatctgaatcagtaaaattttcctatgtcttggagctgatgtctacatatatatggaagagagtagaccaaacttatctaaattagacactgtatgtgtccttggaatgatgtggctgcaggaacctactgaagatcctctttaccttggcttagggacatttactgaaaatcactctgggtcagtgcctgtttggaatgaaggcagcgagatattcatttacttctgttatgttacaccgttgataggttttccctcttagcctttaactagctagcataggcttgctgaaagtactattcttttctctttctgcttttgtgagataagaaggtcacaaattattttatatggtttcatcacattttggggagggaataatattttcttcataattgttgtgtgtgtgcgtgtgtgggtatgtgtctatgtatattagtgtgctcatgtatgtgtgtgtgaatatgagacagagaaagagaactacaatcacaaatactataatcacagggaccacaggttccttgaagtacattatagggacttttttatttagtaaattttccagtctttatatgtcttttgaatgctttctcagctgagtggagattttgtatgccttattaatgtatgtgtttgtgagaaagagcatgaaatattttttaagaaatgaagctacctattatattatattcattcattcattcattcattcattcatgttggggtcttgctttgttgcccaggctggagtacagtgatgtgaccatagccaactgcaacctttaactcctgggcccaagcagtcctctccccgccccactgcctctctagtagctgggcctacaggtgtgcaccaccttgctcagctaacttttaaaaaatttttatagagatgagccctcactgtgttgctcagggtggtcttgaactcctagattcaagtgattctcctgctttggtctcccaaaatgctgggattacaggcatgagccaccatgcctggcctaacctacctattttagatcacaataaaaattatatccagtgtaatattattagaataagactctcaatgaattagagcattttgcttttgctggttgaaattggaaagaattagaagcggtgaaatttttgtatttgatattgagatgtattagacctaacactgaatcttgggaaaggcccagagagtagtcagaaaattaaaaaacaggaatgaacagggtctagggaattgaggttaaatagattatcaaagggactgtagataacaaaggtcccaaagggcagggaatggcttttaaaataagagaatagtatttatgaagcctaattgatgcaggtatctgtgatttgacctctacacactttcagctctccatataaggacatcctctctattatctttatcccatacattaggaatgacatcagcttttggcttcaactttactcacatactttgatggttatctgggtcttttgatgtcttattttctccacatttgctccactttccaagacaatcatatgcttcgacttattttagtttctcccagcttttctctaccccagcctctcctttcctttagctgagatccttacactctgccttatttctcctccatcctcacatcctcattccttctttgcagggaatttctctttttcctctttattgcttcttcttttccctctgctcaacgacaggctttgggccagtttggcagagtctttcagttctgttagttctgggccagctacaaacttcttacttatttactctaaggctgtccaagtctgaaggttcttggagtgtgcacacagcatctccctccataggaaatggactttgcacagtagtgtttatagtagtaactccaaatggaggtaaaatgataccccatcactattattcattcacaaagtattaagtgccactaatgccaaggtctgaggctataactacaatcaagacaaaccaagggccttggctctaggctcttggagtttacattatataaaataaaaacaaactttaaaaatattttaaacaaaacaaaacaattaaaaagaaaataagcaaaaatacccaaactgattttttcttagttatgaaattcctccaaagggcaccttctgactgatgatatgtttataataactttccttagtctaatatttaaaatatttttgtcttttatttagggtgtgggggatggaagtgggttggagaccataatgacatgcttattttattttattttttttcacgggatggggaagctcttaataacctgttgctgtctaaaactaggaaactggtctgacagaaatccaaactctcttttagcctttcttctagactttgtcaatcaaactcattgtaagcatcctaagtgatttgttctctttgtcccattttattcctgtttttagtgagtgaaatgggaagaaattagaactgaagtaacttgaaatatggaaaactaacatagaaataatggagaataggctgtatgtatattgtggaattttgcaaacacttgactatggctatgaatgaagacattcagaagcctgtggtgtaattcttttacaattatattgctgctgcctttagcatccttctttgccacagagctgtggtttgtgacaactatttaattagaatggcaaacagagtggctaagttcaatatttccccccttcttttctttatgaaaatgagaaagtagagtaataccatcttcatttttggaactgctaagttggaaaccaggaacataactgccttaaacctctgtagtgatgttattctgcacataattggcatgaaaatagaatatattctctgtggttgtacattacattttctctttattagccatgatgaagtttatgtgtttatgcaaataacacagagagataagtttccctctcagaggcagtgagattggcattatgagatccatgtttacattatggttttaccacttgctatgtgaccatgaacttaacctgcttgaagttcatttgtttattatcaagtggtaataataatactaacctcacagtgttgatatgaggattaagtaagataatgtgagttcaggtacctagtactcaaaaagattagttgaccattactctcgaatatagacattttctagtaggtttgttatgccaacaaaggaagaagaaagaacatcaatgagtcaatgtgggtgtagaaaacattaacatacattattctgaaatgacatttattgctagttttatggtcccaagcaatgaaaatcagacccatacctccaaatattctgacaagaacatgcagatcctcttgtatgtctattacatgtaagttatcttagttattttttgtgctacaaatgttatttattcttaagaataaaaaaagattcaatttatttcataggccatgagatctttgttttagcttgtccatgggttctctattggctcattatggaggtatgaggtgaggaggacgtttatgtgtcattgtattacattaatatgtacacattcaaatatcttctttctgtgccatagattctcctcacccctttttattgtaactaatagttataattgcaaaggactttaaattgctacatgtgtgctaaagaataacaatgattttcaaacttagtacagaatgtaattaatttttatagcaacagtatgtacctgccaagtgggtactttgaaaatgaagttgtttttgattgtgtgaaactgcttgaaaatgtgattctccaaagctttctttttcttatggccagaaaatagtgatatggaaattaattatgattatgcacttgagactggttcttcttctgcttttattttctttttttttaaatgaatcttaaaaaacacaaagtttctttggaccaagaacaagcataagacatttttacaccctggattttaggtggaaaggtcctgctggttgtagctttgagtggatgaaacaccacttgcccaagaagcaacatactttagggtacacttgtatttcacctttttggtgcaaggtgacatttttctctagcatccttacttgctcaggattgcagtataatgtgtttacattataggccaaaatctaagtagaaagcactgatttattctgacaatatgtcttctgaaatgtcagatgtaaaatattcacaagaacgttgttaggaacctgttttccaacaccttcccaggttagcaaaaatgccacacaccaatttctaattcccatgtataatctggttgataatctcttttggtcctcatctttttcttcttggatttgggtgatatgtttctggaaaaggctgattaaacagtgcgtttccaaaacaaaattatttatttggttgtataggtgaggattcagaggaaaagccagataacctctttgtgtgtttatgtggcaaggatgataagttaatgatttgcttgaggtatgatagtttagagcagtagcttggggagggcaagattattagaattatcctctggcgatacccctccaacgtatatacttctttcaacttagattccaactagtatagatactgttaagataactggtttatttagagtagtggttctcaatcttcagcatgattcagaatcccctggagggcttgttaaaatgcacattggtgtccacactccccgctcatatccagagtgttgatagaattggtcaggcgtattcaaagaagaattggtactaaatcttttgacactattccacaagatagagaaagaaggaatttcattctgtgaagccagcgtcaccctaatacccaaaccaggaaaggacataatcaaaaaagacaactacagactgaaatctttgatgaacatagatgccaaaatccttaacaaaatactagctaaccgagtccaacaacatatcaaaaagataatccaccatgatcaagtgggtttcataccagggatgcagggatggtttaacatatgtaagtcaataaatgtgatacagcatataaacagaattaaaaacaaaaaaaatcacatgatcatctcaataaatgcagaaaaagcattcaacaaaatccagcatccctttctgattaaaactctcaacaaaattggcatacaagggacgtacctcaatgtaataaaagccatctatgacaaacccacagccaacataatactaactggggaaaagttggaagcattccctccaaaacctggaacaagacaaggatgcccactttcaccacccctcttcaacataacactggaagtccctagccagagcaatcagacaagagaaataaatggcatccaaatcggtaaagaggaagtcaaactgacactgtttgctgatgatatgactgtttacattgaaaaccctgaagactcctccagaaagctcctagaactaacaaaagatttcagcaaattttctggatacaagattaatgtacacaaatcagtagctcttctgtacaccaacagcgactcaacggagaatcaaatcaagaatgcatccccttttacaatagctgcaaaaaaataaaatacttaggaatatacctaacgaaggaggcgaaagacatcaacaaggcaaactataaaacactgctgaaagaaatcatagatgacacaaacaaatggaaacatatcccatgctcatggatgggtagaatctatattgtgaaaatgacagtactgtcaaaagcaatctacaaatttaacacaaactctatcaaaataccaccataattcttcactgagttagaaaaaaaaattccaaaattcatatgggaccaaaaaaaagcctgcatagccaaagcaaggctaagtaaaaagaacatctgaaggcatcacactacctgatttcaaactatattaaaaggtcatagtcaccaaaacagcatgatactgttataaaaataggcacatagaccaatggaacagaatagagaacccagaaataaacccaaatacttacaaccaactgatctccaacaaagcaaacaaaaacataaagtggagaaaggacacccttttcaacaaatggtgctgagataatcggctagccacaggtaggagaatgaaactggatcctcatctctcactttatacaaaaatcaactcaagatggattaaggacttaaatctaagacctgcaactataaaaattatagaagataacattggaaaaacccttataaacgttggcttaagcaaggatttcatgacgaagaatccaaaagcaaatacaatagaaacaaagataaatagttggaacttaattaaagagcttttgcatagcaaaagaaacagcaaagtaaacagacaacccacagagtgggagaaactctccacattctacacatctgacagaggactaatatccaggatctacaacaaactcaaacaaattagtaaggaaaaaaaaatcccatcaaaaagtgggctaaggatatgaatagacggttctcaaaagaagatatgcaaatggcccaacaaacatgaaaaaaatgcccaacatcaggaatgatcagggaaatgcaaataaaagccacaatgcaaaaccaccttactcctgcaagaatggccataatcaaaaaatcaaaaaacagtaaatgttggtgtggatggcggtgatcagggaacacttctacactgctgaggggaatgtaaactagtacagctgctatggaaaactggaaaacagtgtagaaattccttaaagaactaaaagtagaactactatagcagcacaattcacaattgcagaattgaggaaccaactcgaatgcccatcagtcgacgagtggataaagaaactgtggtatatttataggatggaatactactcagccataaaaagaatgaattaatggcatttgcagtgacctggatgggattggagaccgttattctaagtgaagtaactcagaaatggaaaaccaaacatcgtatgttctcactgatatgtgagagctaagctatgaggacgcaaaggcataagaatggtacaatggactttgggaacttgaggggaagtgtgggagggggtgagggattaaagacaacaaatatggtgcagtatatattgcttgggtgatgagtgcatcaaaatctcacaaatcatcactacagaacttacgtagccaaataccacctgtatcccagtaatttatgggaaaaacaaaataaaataaagaattgctctggtgtgagtgtcaataatctgcctttctaacaagcgtacaggtgatgtggatattgctggtctggagacctcactgtagaaaccactgatttagaggattgggaaggatttgtctctgcttcaaggtcttgggaagtcaggatggggagtttggtagggagggggatggaaaaagattgaagaatgctgatcatcttgcttagttactagaagtgttgactagcagactcttgcagtgttaaacattagtgaagctgttaatattaattacttttattaatgagaatcagagaaagttaggagaggaaacagatttgattatttcttaatactagtcttctcttcctcatctggttcctgcatttttcttggacctgaacctttctcttgctcctcatatagtataaatatagatagccatactatcactgtctttcagaaatgcgaagaatgatgagacggtatataaggtttcttggaaaagctgtcacatcaatcaagattacaattataatgaaaacctcattaatttggcttctacctattcagattttgcagcagttaggacagtgcttgggctgaaatgtgcctttgcagtatttataaagagtgcctatagcaaatcaatgactttaggctattggctaggaaatttaaattacttaatggaaaactgctttaaatttatttcagtactgccacttacatataaattatttgatgattagaaatttatcttacctatttatttacataagctattttcaacatgattaggattgctaaggcttcattgctttaggattgtataattcagatttattcacttattcaggcagaacttttactcagttagtccaaatagctggttttgtttttaaatgtcaagtgcaaaattgtctgtactcatcattttctattagtttcaatctcagcattatttgggggcattcagattgtacctagtgtcttttgtattgagtggacactagaaatctaatacctggctcaaagaagaaaatgtgcccttcaaaggggttcttttaattttgcacataaagcacattttcaaatgttattttcctttgaataatgctctgtgcttaaattttcctagaataaaacacccaaccaggtaaaagatttaagagatctaggccatgcttacttgatgaaatgcagcagagtggaaaatatcctgtcttgccagttcaaggaaattataatttttctgatctggtagttaaaaggaatgatatttaaatagctgctgttatataggcattaatttattaggggcagattttagtcttttgtgaaattatatgttgaggtctgtatctgaaggaattaaagtctaatctaaagaattatttggaagcaaatgtgaagctatgttagaacttcggtgcttcttttcaacccttgtcctcttgctgtaaagagcagcctgagtcagatcattgaggattaaggatgaatgcattactcagcaccctgcagcagttgggtcaaacatcttggctttgaaaagttaggtttttttttgcttagcaagcctagaaatttcaggtccaactgcagaatgaaagttcagtattctgttgattaacatggtctacttgaaaacagcctgtggctcttctacatgtccttcctctctatttgtgtatgatagtgtctgaaatcattggatggatcaccggtgaaccatattgacagctgctatatggtcagggagattggttcccatgtagtattccgatgacatccatcctttcacttgaagaagaggtttaacatgttaagggggaaaagaggatatacttattttattctggcaaatgggaatgcagagaaataaggcagcctgtgataacactacattgaggcaaagagtgaggattctacatcagatgcccactaatgagaaatattcttgatccaagtgttagccagagaagggaacactttgaccaagacttttcaggttgatctgagtgagtggcatgctaggaagggctgcaaaggcctgggggagaggaggtctgggcctggcatccagggtcagctctgctgaagatgaggaaacagccgctctctgcaggcaacaggaaaaggaaaggaaaccagatagattagcatgtatgtaaagggcaatgacaaagagtgaacaaaaccaggaacaattttatttttatgcttattgtcttagaagtttctttcaaagtttagcttaccttgaaactgaaccaggcagtaagtcctaaacaaggtatttgagattttacatactttacatttaactatgtttgtactccaacctggactctggaaaactcttcagaagaatcctagtgtggttaaaagtatcatcaccatttccatcatcatctactaatgtttattaagtataccaccaaagtctttgtgttattgaaaagaagtctttaattagagtttacttgtgtttttccaggtagcccagccatgacccataggaatctgacttcctccagtctgaatgacatttctgataaaccggagaaggaccaggtaagcaaaaaattcttgcttctttgaaatgtaagagaacgtatatctaaaagatgctgagaaaggattagaggtgatggttgcttcacttaaaatggacctttacgtgcagacaacagtttgcactttcctgggcagaaggagaagcagtgtgtgaagggagctggaatcagaagggaaaaatgtgcgtttacttcagctgttgcagatgcatcacttgggcaatttaaatcttaaagcaatagttgtctcagctttaaaatagtaataatccctgccttctgtttattctagggattaaacgagataacttatgaaaaaaatactttggtaaattataaagaaatacttgcctggcacagtggctcatgcctgtaatcacagcactttgggaggctgaggtgggcggatcacttgaggccaggagttgaagaccagtctggccaacatgacaaaacccgtctctactaaaaccacaaaaattagccaggcacggtggcacagggctgtaatcccagctactccacaggctgaagcatgagaatcgcttgaacccgagaggcagaggttgcattgcactgagatcgcaccactgtgctccaacctcagtgacagagcgagactttgtctcaaaaaaaaaaaaaaaaaagaaatgctaagaaatgctgaaattgttgttaacttttgggggatactttagggcaaggtaatgacagctaagttctcactagctatatatttgtttgtctattaaaacatatagttgaatgaagagcaatcaggttttgaatatctgtttgctttctttggaagagaatatggtgtaaactgggccatttttgcccagctacgtaaatatctctgcaagaaaattatattttaagaatatagtatatggaaaaatgatgcttcctaaatgaaaaaatttcaaagttttgaagaaatgaaagcaatatatttaaaaaaatcatagaaatcctaagactgtttccccaggattgaaggagaagtagcatatattggaaagaagaaggaacatgaagcaagaaaatctggtcttgctacttgttccaaaactggctagttgtgtgatgatggacactagttttgttctttgctaagtggaaactataatacataactcacctcagaaaatcaaatatctgatccttgctcttttaacttaccattttgtcttttgatatagtagaagagatggttctggttggctccatgcttgatatgctaattgtacagttagtcctccatatccgtggtttcatatccatggattcaaccaaccatggacagaatgaaaataaaattgtgtctgtgctgaacacatacagactttttttttgttgtcattattctctaaataatacatcatagcaactgtttacatagcatttatattaggtattataagtaatctagagcaatttaaagtgtatatgaggatgtgtgtaggttatatacaaatagtatgccatttatatcagagtctttagcattgtccaattttgttatctgatggaggttgtggaatcaatccccaacatatactgagggatgacttgttctttctctttctgtcttttaagtgggtgagtttgaagattcttcttttcacactttgctgatttttttcaagaagccatattcatgatggtgttcctctttaactgacagcacttgtagtagtcatagaggtttataggccttggtgaattctagaaagtacgggaagggtgtacattccattccattctcccgtcccttcccctccccttccgtcccctcccctccgttcccctcccctcccctccccctctccctccctcccttccttccttccttccttcctccctggtagtgtcttcatcatctcagatctgaattgctagaaaagctgttggaattgatcccttgtccccattttttctcaattcaatatactttttacatagttgccctcatttttctactctagattaaaaatggttagtggcttcccatcattttaagttcaggacttcttgatgacctttatgatgctctgaaatctgatgttatccgtcttgtcttcatttattcatttgtgttccccagaagagggactctgtttaggtcaggactaatttctttacttacctcccactttacattgagataaattcttgactccttcagttgctccttcagatgctaatgtggattgtcaccttcctttcatctttctacctcttgaaatgatcaggaagaagagcatttaaatatgggtacattggtagatacatacctgtagtggaaaagggagaactcaggccactagaagttttcttaaatttatttcgcacattttgtctccactcattgcttaccaagccatgctgattatttgcaaggtttgccatgagtcttaatactggttaaggcagtgtactaattagcttaggaatatcttgttgatggagttcttgaggaagccttcttttattaagggcagctctccttttgccaggaatttggcaagaagcagctggtaaatgctgacagataaatttactaacttattgggtcttttcatatctgggcatatgcagaagaaatctgatggcttaagatgcatattacataaaattttgattccagtagtagaagaaatatgtggaacattttttgtgggtattgattttgttataaagcccatgggaatggagtctttaaaaccagaatcttcagtgcctatcactagcatctcatagtcatcaaggttcatgtttagatgaagcgaggaaaatttaattcaggaatgttccttttgttttcaaagccagcaaaggaaggttgatgaatatataattataagaccaactattaatctaatttgtatctattacagtgtatatagttaatccaatgagttcttcaagaaaggaagaaactccattctctcttcctaccagagtttgaagagaggcttttgtaactaattcataatctcttctacaaccaaaggtacaggtacagaaatcaaactaacattttcagtttctatacctactattttggtaacttcaaatacaaaaactcctggatcattttagggcaagaaaaaggaaagtggatttgcaagtaagatgaagctgtgataaactctggcttttatttttttttaacctgtttcttctctgtttggacaggaaagaaaaaaaaaggtttccaggcttatgtttgttttgagaaagcttttataattaattagccagtgtcctggaagtgatcttggcagtaaactcaaacttgtcttgtgtacttgtccaagttggccccaaaaacttccatttgaccaggactgaaatttctgattgactgattattctgcctggatacaatttgaacagttgtgatggtgccttgcaacttcctggagctacctaacttcttagtagcacaaagaatgggttcagagttatgaagaggaacagaattgctctttctgacagctacatagtgacagaatttgagggcatattttttatgagattctgttttgggaaaacagaagaaacaaatctgtgggctgcactttttctttctggctttgccaagcctatgtgcttacgatttcagtagcggctgctttattgaaaaatggcttaaaatagttaacagcagaagaagagcatagccagaatttaggtgattcaatgcttcaaccatattccaacttggatgttatatttattaagcagaaaaacacctgtggagaagtagatttaaaaaatacatctggagttcatctagttgtaaatctacataaataatctcttctattttgttgctatggagtatttttcacattatctaattatgtttcttgattgcctttgatttgcttttccatttcttcttattctttttctgttcttttaaaaatttacatgtgaggtgggtgcttatcaaatgcagtggatttagttacagttttcatgtgaatatggcttcagctatgaggataagaaagagcttttctcttcattttaccccttagctttaactcttgtagaaatactgtgcttagtggtgcaatggctttaaaaatgttgactttttccaggtttattaataatgctataacatctcacaattacatgtcaacctcaagtgaaattgtagtctgtagattgcagtggatgcagtagatgtagaaatagcctgcagattctcagggggacacttgaggtctacataaccttgtaactgcttatctggttattatttctgtgatattcattatttagctggctaatctgagaatctattccataggtcttgtggtggagttttgcctaaggttactttctaaagcatattagaatcatttttagcactgtctgttgcctattatgtttaaatatattttgctgccttgattcttgtgtttgaagtcttggtcttttaaggaaatagacctgaatttaaatattttgtcagaaagtatgcggatgaaaccattaaccatgtataagtttaaagttgctaagccataactatcttaaaatgaaatctagaaggaaacatcctgtgattattgggggaataacccccaatccttttcttacacatacatgatataggagtgagtcaaccaagtccactgagatgactttttctcatgattttgaacatagatttccatcccagggctcacataaagcttctcttagcattaatagttatttcatgctcacagtgaaggaaaagtacaaaagcacctccttttcctttccatggctcagtcaaaaaaacctacagttcacactgaatgtgggtggtcttacttcacccctcagaggaggtacagtgtctaagaaagattcatattttctgaggttataataattgtctttagcatgttttcagggagcagtgagacattgctgtgttagaggagctccagatggaatcacatctgtgaaaacctaagaacaaaggcatgttgtgagaaggtagttagggtacttagaggtccttagtcactacagttttggtgactttggtgagcatctctctggctcagcacctacagctttccttcagccaggtgtccctgaggggaacttgtgtagccatgcaatgatatccttgggcccctttcacagggaaacagcttgtgcttagataattaacaaaacatgtctgtcattattttttccctgtctacaagaaatttggcttaagatagcttccttttcccattctatgcttctcccatattcttaaagcttaaacagttgacagggattagtagggtttgagaagcattgatattaatactgatttaaagaaggtatgtattttaaaattgggacagttgcatctccgcatttattaatgttgtacattcttaaaagctatttgtctggaatagaaaactagcattcatttaagaacgggttttgtatcagctttaaactgaagtagatgatcctgtatgaagtaaactgaactctatctcgtgtattattttaggaaaaaaggagccttttgtgaaatttagagctatggttttaagtaactgcgctacaataaatttgaactcctaaaacaccccatcactgcatgcagctatgatttgaattcattcattcaaaatgtatattctgtgctagaaaatgttcttagttgtgggttccagaagtgaatgaaacagataaatcttttgactcatggaacttccatacttttgggaagagacagactgtaatcaagaaaaacaataaatacataggataatttcacataatcaaaagtgctatcttgaaaataaagcagggtaatgtggagaggtacaggaaaactattttaggtaagagggttagccagtaaggagaggatctggtgagagaggtttctaggctgagcaaaaagcaagagtagaggcctaaggcagaaatgaagatgatgtgttcaagaaacaggaaaaaaaatatcataagtggctggagcaaatgtagcaggtgtgcagtggtagacaagtcaggaaaataggccggaggaccttttattttattctgagtgcggtgagacactctcttaggatttttacctagagtttgtatgttctgatttacattttaaaaagctcactggagatgcaatgtgataggatggagaaatttgtgaatgtgttggatcgtctggtgttattcctatattaagtattgtatgaatatcccagtgcattaaaatgagagctcacagacccataagagcccatttcttaatgtgttagccatagccattaagaccttattactatcagcaaaggaagttcttctgtgccatagaaatatcgtaagaaagaaaaagagtttcccagttaaaaggtcatccatgtactgttaattatattacattattaatgagtaaatattaattattgaaatatttaatgcactagaagtgggtgtaagccaccaagaatagtgagattgaatttttgagtaattatatttgcacctgtggtcctcttgttattactgttggctaacatgaggcatgccaactggctaatgacacatgattcatgaaagcttcactggagtcctctctgaagaatggtaacaggaaaccttcttagtctttgtggttcagaaaggagcatcaggatgtgtaggaacaggacagaacagccaaaaaggggctctgtgccacattcttacctgttcctatgaaagaattgaactccgattgcactgcatccctgtattcaacatttaaccaaagaaattgtagctattgcatatcttaataaactggcatgttttacatttgatgtcactttttttctcttttcaatatgtagcattctgccagtatgccaataccaggaatatacctagaatatatttcagagaacagtagcatgctgtcaacaataatctttgatggacgtatactctcacatcacaagttacttacatctgacagagacttcataaaagaaacgagcatttttcttcttggaagtggcaaattgttacaaaaccagaaaacagcaataccttgtgatgaacactcttgagtacagtttttaaaactttatagaaattgtaaatatatatagggaatcattctttttttttctttttgagacagagtctcactctgttacccaggctggagtacagtggcacaatcttggctcactgcagcctccaccttttgggcttaagctattctcttaccttagcctcctgaatagtggggactacaggtgcacaccaccatacccagctaattttttttttgtgtatatatatataatttttttttgagacatgcagttttgccatgttgcccaggctggtctcgaattcctgggctcaagcgatctgcctgtcttgaccttccaaagtgctgggattataagcgtaagccactatgccccacccatggaatcattctttacttactatagtaacatgttattatccacaatattttttaaaactttagaattttctgattcaaaatatacaacaatgctgtaaaatttaaacaaagcaaaaatgaataaaataaaaagtgaaaattcttaaattaaaatccttcaaaacaactgccattagcagcttgatgttgagtttaatgaacttttctgatagatgaatacttatatatttctatataaataataaaaatgtgattgtattgttctaaaatttgatttttttaaactaacaataccatggacacctaccttattcttcttaaaggctatatagtatatatgaatcgtattttattgattctatcttctatgactagatattttcagttctttgctgtacaaataagcctttaagaagtatccttattgtaatttttctgcattctttcatgagtatttctggaggagaaatttttataagtggaattgctggattaccgtgtattgcgaatttaattaccttcccaaaagattatatgagttatgttctagatctttaaacactttattgaatccgcctccactgctaagatactatttgctggtcagatttgagtttattctttatgtttcactccactaaaagcttagtgattcaaaatgaaaagaatctcagtatctagcatttgcctcccagctcactttgggggctttttgtcagaagcttaaagtatagagattaaaactgagtttattttcctgatctaattggacgtccgagctggctaatcacttgtattctgaagtaaggaggtgaaaagtgcagtggccatatacttgctttgactgaagatgttgctgttcccagctctgagagggcttttcaggctctgtgagaatttccttggcaaccaaaaaatggcttcatctcaagagcccttcttggtggtcagcatttggaacaaaaagaaaaattgcaaaaagagttggacaagtgttccctttgaatattattcaacacatttgcagcttggatctacatctccttcctttccttcccccaacccccaagagaattttaaatgcatatatgccagactgtaaagttagttaaataaaaagttttataccttatatggagtgctttattaggagctttgaaggagtgttgtcaactgaaatggctaataaaaagatgagccaacacttttttttttaacatgttggggcatatttgcagattctactgctccccaatttccctcttaatagggaatctctgcagagtaagtttatgaagaggtcacaccatgggaggaagtttttcctgttcttctttagaaagagaagagctccccactgtttctagctcacttgtctgattgatccagtggctggttgatttatgtgtctcagcagaatctcatgaccttatcagtcaccagcagagcttcctggtttctccatgtgttacccaccaatgggctggttttacttcctagaactgaactgaaatgaaaacaatgattcttttttttttttttttgccaccatgttaaaaggacagcagtaatgttttctacaatctgaaagccagtggttaatcatgccaagatgacattcctgactaatcagtgttccatgcatacacatataagagggtaggaagtaactgagtcattgcatagggagtgattgtaagctttgaacttcaaaattagctgtactcttcatcattcagtagctgtatctgatagtattgagtctattgctacgtaagcaataattaacaactagcatagattggacatctaattacaactaatgctttggggttggtactgtcaactctatttgacatattggcaaactggaggcatgaggagattaagtaatttccctaaagttaaatagcatctaaatgatagagctgcatcctggtcctagtgcctgtgctcttagtggatataatgagttctgcctagttggattagggtctttttaggtccctgaaagccactgtggaacagacacgtattcaatcgaagtttctggcttttggtttgtctttgaggcaaacatcatgctgaataggctaattaccagaattactattaaaaatgaataataaaaaatttttaagggtcttatggtgactggatggatgtttctgctgccacaatgattaaaatactcaatgttatgtgctgatactctggatgtcattggtgaaggtcagtgaaaaaagactgatataataaaaaagtataatctatgatctcagattgtgagtttatatcttagctgattattcacaccgaataaactgtggtgctgacagtgaagtgcagctggggttcagtgaaagacacaactgtgtgggccaaagccatcaatcaaagaggaaccagggactttagaagcatctttccattctagagaacaaaaataacagaataaaagagttttaaccaaataaaacattcttccttggataaaaggttaggtaagaaatgggagaaataaattggaatgcaactatctagagtttagcaatacaagtaaaagacttagttcatctaataaatggaaattattgtggcttttagaattatttgaaataatagccaaactttccaaatttgaggaaatacaacatttcaatgttttttttttttgtagttagtgtgacatgtagaattagtgaaagtagattagttagttgacttgtccacagaccacaatgaatagagagttacaacacacttaatttacagatcttcacttgtgctttgctaaaccccatggttctttgactttcaggctgttaaatattcattctcactatagatagggtcaactctagttcatttagtctgataaatgcacatcattatgaccttaaaattttgttctggtaagaggaaaaagtgattattattgaacttttttattaataagctaagatataaacttacaatctgagatcatagattatacttttttattatatcagtcttttttcactgaccttcaccaatgacatccagagtatcagcacataacattgagtattttaatcactgtggcaggagaaacatccatccaggatcataggaatagctttgaagacttaagtaagcatagtaaaccttaactcttctgaacttcagttttctgattcataatagagatattatacttcagtctgaactgctttttctactgagttgttttgtgaaaaggaaaatacttaatacacttcaaaatgttatataaatcttcatcatcattgccattttcattatttaaatgggctactgcttttttatttttggttttgctttgcagtaagatttggtgggatgaaagtccatttcatttaggtatcattccttatcttttaaatttgcattgttaatttggctctttggagttcatgctcttaacttctgctctatactgctctatccacactgtaaagaaatgtatgtccgattgtcatttcatgaatcttattgaatgcacattactcttgtacccaaatttctctttttctctctacttttccaagtcttacctttacttcaaaacttgtcaagtgttactttttctttatatccatccttgaatattccagcttatgttaactactcctgttttgaatttccaataccatctagtacttattattttcatcactgatgtggtttggctgtgtccccacccaaatctcaacttgaattgtatctcccagaattcccacatgttatgggagtgacccaggggcaggtaattgaatcatgggggccagtttttccttttctattctcatgatagtgaataagtctcatgagatctatgggcttatctggtgtttctgcttttgcttcttgctcattttcttttgccaccaccatgtaagaagtgcctttcacctccctccatgattctgggcctcccaggcatgtggaactgtaagttcaattaaatctcattttcttcctagtcttgggtatgtctttatcagcagcatgaaaactaactaatatagtaaactggtaccagaagtggggtgttgctgaaaaaatacccaaaaatgtggaagcaactttggaactgggtaacaggcagaggctggaacagtttggaggtctcagaagaagataggaaaatgtgggaaagtgtggaacctctagagacttgttgaatggcattgacaaaaatgctgatactgatatgaacaataaggttcaggctgaggtggtctcagatggagatgtgtaacttgttgggaactggaacaaaggtgactcttgttatgttttagcaaagagactggaggcattctgcccctgccctagagatacgtgaaactttgaacttgagagaggtgatttaaggtatctggcagaagaaatttctaagcagcaaagcattcaaaaggtgacttgggtgctgttaaaagcattctgttttagaagggaaacagagcataaaagttccgaaaatttgcagcctgacaatgcagtagaaaagaaaaacccatgttttgaggagaaattcaagccagctgcagaactttgcatgagtagcaaggagcctaatgttattccccaagaccatgggaaaatgtcttcaggccatgtcagagaccttcatgaaagcccctcccatcacaggcccagaggcccagtaggaaaaagtggtttcgtgggccacacccggggtccccgtgctgtatgcagcctagggatttggtgccctgtgtcccagatgctccagctgtggctgaaaggggccaatgtagagctcaggctgtggcttcagagggtggaagcctcaagccttggcagcttccacatggtgttgagcctgcgagcgcacagaagtcaagaattgaggtttgggaacctctgcctagatttcagaagatgtatggaaatgcctggatgcccaggcaaaagtttgctgcaggggtggggcccttatggagaacctctgttaggtcagtgcagaagggaaatgaggggttggatcccccacactgagtccctactgaagcactgcctaccatagctgtgagaagagggctactgtcctccagaccccagaatggtagatccactcacagcttgcactgtgtgcctggaaaagctgaagacactcaatgccagcccatgaaggcagccaggagggagaatgtactctgcaaagccacaggggtggagctgcccaagaccatgggaagccaccttttgcatcagtgtgaaaactggagtcagaggagatcattttggagctttaaaatttgacacccccactggattttggacttgcattgaccctgtaacccctttgttttggccaatttctcccatttggaacagctgtatttacccaatacctgtactcccattgtatctaggaagtaactagcttgcttttgattttacaggctcacaggcaaaagggacttgccttgtctcaggtgagactttggactgtggacttttgggttaatgctgaaatgagttaagactttgagggactgttgggaatacattttcaatttttggagaagttcaagagagaggcagttgtaaaatagaatactagtgtggtttttttggtttttgtttttgttttggaataaatctgaatttagaatgattccacattaattagttccacaggagtatatacaggcaaattttatattggtggtattctctttcccctctcctttcttgaaaataacaagccactagccagcctgtggtagtgcattaatcattatttttacattgatacaaactattgtgattttttaagctgagaccatagaaagctgacaaagcactgtgggcatatatagcaaatgtaagacaggtttttgtgctgaaagagtgtacagaaagtgtcactcgtggcttataaccattcgatgactacctgttgcctttatgataaagcccagaatccttggcatgaccttccaagacctgcgttatcctgcctggtgtctctctccaaagcagatgtgccaggttttctcccgtcctgactttactacaaccatatggtattcttccagtttcactaacatggcagtctccctcctacctttgggtctttggacatgctgcttttgttcactgaaatgtgcttccttgtccaggcaactggtgttcgcccattatttctctgtaaatgtcaccttttcagggaagttttctgtgacacgccccccccctcttgcccccagtctttgctaggggctgctgttataagctgttacagcacatgatgcttttctaccatgacacctaccacaactgtcatcaaatagttgcctattttaatttttggctacatgtttatcttcactaataggccatttgcttcaaaattggagaaatgatatccagccatctgtagttcatggaccatagcctgccagtaacttgcttttgtatggcttgcaagctcagcaaggttacagttttaaaaagcagttaaaaaaaaagaataagtgacagatactgtatgtttgctcataaagcctaaagtatttagtgtttggtctttcacagaaaaagtttgcctgtctgtggtctaagttgttgctatacatgttgggtagaagaatgtaagtgtatttatatgctacgttttattttctgagcagggcacttcattgtaatgtggcatctatagggcctagtgatgttgctgtaagcacttagacaaactgagggccgcatgaacatcagaaggttcttagctggataaacaactgtactcgaagtgtgtcaattaatagccagtgtaaaagtggaagaggtttctaatgccatggtactttttagcatgtattgctctgctaaacaactgtattagcaatttagattaagacataatacgttattatcagatttacaaatacacaaaactgccatctaaaatttaagtaatataattaagatggagaatgatcttgacaggcttcaaaccacaggaatttcacaagagtaagataaactatgtaagatctaaatgtggagtgaataagaacgtgaaaaatcctactttatttgaacagagaatttatgactttcagcagatttagactcttcaaaggtgtccattattcagaaatacttgaggagatgtagttatggtaacagtgtagtgagatgcctgggcactaacctaagaagaaaaatagaagtaactcatccaaaacttttagagatgagaaagcttgaagggtacaaggctcatgaaagttgccttccagtgagagagaatagatttattgttttttgctccagatataaaattgcaatagcagatggatgtttcgtggaagcagatttcatttcaatataaggatgaattatataggaaattgagctttgtcactaatgtatatatgaactttttaaagtctttctttgcacttaaataatacagtaggtatcaggactacagaaagaaacagcaaacaatccctgctctccaggaggtctcattatagactgtgagatgaatcggtaaataatgtaggatgttagatgtcctagcacagaaatggagtatgaattttgtcaggaactggggagtgggcagaggtgactctgaattaactcttgagttgatgctccttctttcactataatgtaccagaagaagcaaatgactgtatgttaggaatgtgttcactgggtggggtattataaactagtcaatctttaagtaatttaaagactttgtgatttataggaattcaaaaataagaagccgactttgggcttgaccttagaacaaaggagtgaagggatctcaggtcaatatgtcagttaagtaaccataacctactggtggctcagccagaagcccccagatgcagatgaagaacccctcaaccaaacttctgtatagttgttgcctgcctttgtgtcagtgtcttattttcctcttgattccttttttctgcttcttcagtattctttattgttctaatttggtacatgttctgagacctccgtgaagggtacattaaaaaatctgctaaataaataatagcatgactactacagatttaattatagctatacagctgcctgtttgaagtgttctgctggggccatatgttcccttgtatatctcagccctggaaagacctagtttaattgtttcccagcttatagtattgaattcttaaagaactgctagcagtcatttggaagtcaatagattgtgtgttttacctcaactgtctttctgcaactggatgttttattgacaatttcttattagatcccaaataatcagatattaaagcactcatccagacaggtcttaagagctatgtctacttgttagttttacagtctgatttttgtcatcatatttgatgtgctaagtgaaaagtacttctgcatttaagcactttccctcaatggcttttttgaaaaaaagaaaagtattttagtggatgattcttttaatggttttctgtccccatggtatggtgggagcagaaatggaggaggacttgggaaagggcgcttgttgctgttctagaagtataaccttgaacatgtattaacttctctggtcctcaggagggccaaaactgagcccttctaggttccttccagttctaaaattctgtgattcagatcagctggggaacatgctcttgccagtgaaatgcatctggagaagggtggttgttccttttcccactgtggtggtctgtgcatctcttcccccttgtgcttaggaagcccaaatttcccatttcttgagccacaaaaatctttcaatatgaactctgtttagagatcaaagcctcacagagtaacagagctgtggccattcttatctgctttttcagtgcaaagatggtctaatgcagtggttcttaagcttttctcatgtcaaggatccatttgagcttatgatgaaactgtggatgctttcaccagaaaaatgcacaataaatatgaaggacaaaaagttgtgtgtaatttccaggtgcccatgcactccctggatccccatcagccaaccttaagaaccattgctctgtgctttgataagagccctgacatctctgttttgttctgagtgaagggacctgcaggtgaggttgagaacagtgaagtagagggcctaaggcctgaagcaccagccctgagctttgaatggtgccaagggcagagctttgttgggttcataaactatactagggtggagcaaagggtgggagaagcaatggaaagtgttttttccagtttctgcacaagataggcattctgcataagtgtttgtcaatccattaacttttatttatttattattttcaaactattaacttttaactcttggttgcctacattacctctggttattctacccttttaccatgcatgccttgaactttttaagagagaagtctatgttttttattagttaccccaactggggtatgtgcagaagagaatgcatgtaaaacaattctcctgaaactatattttttatttttcttgaagtcagtagccccacaatgttttttcatttgtctatttattttgatttcatatggttgttccttccataacctttctttcctaatggcagctggagtttgtggggcagaaagaataaaagaaatcctatgtttagcatctcttttttgggggtaggagagggaagactattaatagatactgctttttagataataataggtaaggccaaagttagaaataaagcatttcattttaaaacaaagtgtttctgctgaacatagtcattcaaggataagggtgtcattctgagggaatgcagatcattaagattggtgcagttatcatgaggaattatattatatttgttttacagtgtagttgcactgaaccacccatgctcacctcagtctgcagttcattttgcagccttagcatgagatgctgtctcttcaaccttctcaagctaaaatgcatgcaactatacacttggtagaatgaacttacctagggaggtactttactttatggataacatgtttttaagtctatgatacaaactggtggaagaaatttctttttaaagttcagatgattgtatatctgaattaaatgtggtggcaatctagctgtattttactttattcccttgggaaagagaaattttatttttgtcagtcacctcttccccttttttctaggattatattagaactctaatgtgattataattattggtaccatttattgactatctactatactatttcaggtactgtgctaggagcttttacctatatcatgttgtatattatcattaaccttactttacagatgagtaggctaaatgtagatgataactttgtagtcttctcagcttaactgttgcgtaggttaaactttaaaaaatttaaggcacagatatttttaatgcacagctgaattttaaatgatgtatctgtgaatcaccagtattggtgaaatatttgcttttaatgttggagagcactaagcatttgaagaaatcaaattctcgtgttgtgtgtcatgctggattcttcctgctctgtcaccccctttatccaggcatttaatgagtcttatacattctgccttttaatttttctcaaatctgtcttcaacattcagtcccactgatgctttcttgattcagggccccatagtgttcctccatttaacatatttattgagggacctattatctgctcagcattgtgcataaatactttcaaagatcacctcatttactcttcttaattccacagagtaatcatttattattcccattatacagatgaggaaactcactttaaagaaatgaagtcatttgtccagcgtccctcagctaataaatggaagaactgagattttcttctagctctgtctaattccaaagcttattcctgttttcactacttgaatttcaaacactggataacaattagcaagcttagcatggtgaagcttggactctggagacagccagcctttggtttgaatcttcgttctgccttttctagttttgtgatgttagctatatatagcagtttcccatcacctgagtgaggtatgttccaaaacccccagtggatgtctaaaactgtggacagtaccaaaccttacatatactgtgatttttcatatactgtgataaaagtttagtttacaaatcaggaacagtaagagattgacaacaataattactaataaaacaattacgacaatattgtataataaaagttatgtgaatgtgctcctactcttgctctctcacaaaacatcttattgtactgagttcacttattttcagaccctgcttgaccataagtaactgaaactgcagaagcaaaaccttagataagggggaatttctaaatctcaatttcttattgggcaaatggagaccacaataataacttacttatagaaatgtggtgagaatttaataagatgatgcatacgaagtttttggtccagtgcctggccagagatgattgatttaaaacattttaaattattattattattattattactagtaattttagaattattattgaagctctttgtgcctgttggtaacaatggtgcctttagaattcagtcttaccaatatgagattcaaaatcttaaatctggaaggaattcagtgtacagctgttctcccaaagaaagactctttttcaaaatctcactgagaaatcccggacaagggtaggacttttagccacttcagcagggaatttttttaaacaatgaatggtagggacctgtggtcataagttttggaactcgtaaaggccctttgcttcttactagcgacctttctgaagtcgactaccacgagatggagcaccgttagtggagctatcagtgtccctgcttgtttctatgcatgggtgtaaagatgccacaacacaggtgtgaacacatggacttcatgtgtttaacaaacatttatggaatgcttattgcaaggccttggctttgtaaggtactgaggaaacaaagttgaatgatacatggtttcttttcttagggtactttagacctgtctttaaagtacttgtagtctgataagagtcacagccaagtcaatcaatgaatgcctggtgataagcacaatttcagaggtaaggctagggaaagtcagggaaggtggggggtagtcaggggagttagtctttccaaaggcctggctagagttcagaggcataagtggaattttgggactttccctctgagatagatgaatgagtatttcaagtctacttccttcaggcatggagcaagtgacctgtatttatatacagtggagttcatggcacaacagtgaaagaggaaaataacttattataaaagaaaaaatacctaacttagctagcacctagaacctgcagttcttgtttttctttaaatcttttttaaagtgctgttgtctttatttggtcttctcctttccttgtctctgtcccactttattttatgcagttaaatactattaaatactttaaaatatgctcattaaaaattttaaaggtatctttacagaaccaaaaccattgtagatacttaattaacactgttttgctgtataaaaggctctggtatttcaggaaaatagcttctaaactttaggtagtaaaatctattcctcagacatgtaatggtttcaccgtatagtgaagtgaatattcaactcatggcctggccttagctgtatgagtttggtgaagacctttacgcttttgagacttaatttccctcatctgtaaaatgatgtaataatacatttcttacaagcttgctgtaagaattccagtaacatagtacatatgaaagtgttttaaaaactgtaagtagctatatgcgtattgacaatttttttaaaaaaataatgtgagacattaagaaaatgtgacttggagattttaacaagttgatttttaaactggggcagtacttgaaatttcatcctgtttaggaaatcagaactaatggattgtacttaatgttatatttagtttaatagccatttgtaaatgtgctgctttgcagaatcatttgcattaatcgtggtgagatatatttggaaggaaaaattagaaaatcaaatttttaccctcagcattgttttcattttgaagtagtgttttttggaaatggagtaaacacaagtagaagagtattcaaaaagtaaaaacatgtcaccagagccttttggcaacttgtcttatttaatgattttgtctgtattctttcatatttcatacacactggaaatctctgcatcataactattaagttccgaaaacattaaaagtgattgtctaaattttggattctatgggctatcaagcaatagctctttttaggcctcttagatattaggccaacggtatgtaaatttagtcattggaaatattcttctaaatcacacctttaagatagcctgaagggcaatcagcatttccattaacaacaaaacaaaaatatgtttctagtaattatcccaggggttttcttttatgacaccaaaagagtcctatcccataaattagcctaaccaacacttaaataatatccttatttaacagaaaaatttaaaggtactttttcctatgtagtcttagaataaaaggtaatatctacttttggtctttgatgatggtgatgtacagacgggtttttggtgtggatgtcctttctctttgttagttttccttctaacagacaggacactcagctgcaggtctgttggagtttgctagaggtccactccagaccctgtttgcctgggtatccgcagcggtgtttgcagaacagcagtttttcatgaaccgcgaatgcagctgtctgatcattcctctggaagttttgtctcagaggagtacccggccgtgtgaagtgtcagtctgcccctactggggggtgcctcccagttaggctgctcaggggtcaggggtcagggacacacttgaggaggcagtctgcccgttctcagatctccagctgcgtgctgggagaaccactgctctcttcaaagctgtcagacagggacatttaagtctgcagaggttactgctgtccttttgtttgtctgtgccctgcccccagaggtggagcctacagaggcaggcaggcctccttgagctgtggtgggctccacccagttggagcttccctgctgctttgtttacctaagcaagcctggacaatggcaggcgcccctcccccagcctcactgccgccttgcagtttgatctcagactgctgtgctagcaatcagcgagactccgtgggcgtaggaccctccgagccaggtgcgggatataatctcctggtgccccgttttttaagcctgtcggaaaagtgcagtatttgagtgggagtgacccgattttccaggtgctgtctgtcactcctttctttgactaggaaagggaactcgctgaccccttgtgcttcccgagtgaggcaatgccttgccctccttcggctcgtgcacggtgcgctgcacctactgacctgcacccactatctggcactccctagtgagatgaacccggtacctcagatggaaatgcagaaatcacccgtcttctgcgtcactcatgctgggagctgtagaccggagctgttcctattcggccatcttggctcctcaccatcatcaaagaccaaaagtagataaaaccacaaagatgggggaaaaacagagcagaaaaactagaactctaaaaagcagagcacctctcctcctccaaaggaaagcagttcctcaccagcagtggaacaaagctggacggagaatgactttgacgagttgagagaagaaggcttcagacgatcaaacaacgagctaccggaggaaattcaaaccaaaggcaaagaagttaaaaactttgaaacaaatttagacgaatgtataactagaataaccaatacagagaagtacttaaaggagctgatggagctgaaagccaaggctccagaactacgtgaagaatgcagaagcctcaggagccaatgcaatcaactggaagaaagggtatcagtgatggaagatgaaatgaatgaaatgaagcaagaagggaaatttagagaaaaaagaataaaaagaaacgaacaaagcctccaagaaatatgggactatgtgaaaagaccaaatctatctctgattggtgtacctgaaagtgatggggagaatggaaccaagttggaaaacactctgcaggatattatccaggagaacttccccaatctagcaaggcaggccaacattcagattcaggaaatacagagaacgccacaaagatactcctcgagaagagcaactccaagacacataattgtcagattcaccaaagttgaaatgaaggaaaaatgttaagggcagccagagagaaaggtcgggttactcacaaagggaagcccatcagactaacagcggatctctcatcagaaaccctacaagccagaagagagtgggggccaatattcaacattcttaaagaaaagaattttcaacccagaatttcatatccagccaaactaagcttcataagtgaaggagaaataaaatactttacagacaagcaaatgctgagagattttgtcaccaccaggcctgccctaaaagagctcctgaaggaagcactaaacatggaaaggaacaaccggtaccagccgctgcaaaatcatgccaaaatgtaaagaccattgagactaggaagaaactgcatcaactaacgagcaaaataaccagctaacatcataatgacaggatccaattcacacataacaatattaactttaaatgtaaatggactaaatgctccaattaaaagacacagactggcaaattggataaagagtcaagacccatcagtgtgctgtattcaggaaacccatctcacgtgcagagacacacataggctcaaaataaaaggatggaggaagatctaccaagcaaatggaaaacaaaaaaaggtaggggtttcaatcctagtctctgataaaacagactttaaaccaacaaagatcaaaagagacaaagaaggccattacataatgttaaagagattaattcaacaagaagagctaactatcctaaatatatatgcacccaatacaggagcacccagattcataaagcaagtcctgagtgacctacaaagagactgagactcccacacattaataatgggagactttaacaccccactgtcaacattagacagatcatcgagacagaaagttaacaaggatatccaggaattgaattcagctctgcaccaggcggacctaatagacatctacagaactctccaccccaaatcaacagaatatacatttttttcagcaccacaccacacctattccaaaattgaccacatacttggaagtaaagctctcctcagcaaatgttaaagaacagaaattataacaaacgatctctcagaccacaatgcaatcaaactagaactcaggattaagaaactcactcaaaacccctcaacttcatggaaactgaacaacctgctcctgaatgactactgggtacataacaaaaggaaggcagaaataaagatgttctttgaaaccaatgagaaaaaagacacaacataccagaatctctgggacacattcaaagcagtgtgtagagggaaatttatagcactaaatgcccacaagagaaagcaggaaagatccaaaattgacaccctaacatcacaattaaaggaactagaaaagcaagagcaaacacattcaaaagctagcagaaggcaagaaataactaagatcagagcagaacggaaggaaatagagacacaaaaaacccttcaaaaaattaatgaatccaggagctggttttttgaaaggatcaacaaaattgatagaccgctagcaagactaataaagaaaaaaagagagaagaatcaaatagacacaataaaaaatgataaaggggatatcaccaccgatcccacagaaatacaaactaccatcagagaatactacaaacacctctacgcaaataaactagaaaatctagaagaaatggataaattcctcgacacatacactctcccaagactaaaccaggaagaagttgaatctctgaatagaccaataacaggatctgaaattgtggcaataatcaatagcttaccaaccaaaaagagtccaggaccagatggattcacagccgaattctaccagaggtacaaggaggagctggtaccattccttctgaaactattccaatcaatagaaaaagagggaatcctccctaactcattttatgaggccagcatcatcctgataccaaagttgggcagagacacaaccaaaaaagagaattttagaccaatatcctttatgaacattgatgcaaaaatcctcaataaaatactggcaaaccaaatccagcagcacatcaaaaagcttatccaccgtgatcaagtgggcttcatccctgggatgcatggctggttcaatatacgcaaatcaataaatgtaatccagcatataaacagagccaaagacaaaaaccacatgattgtctcaatagatgcagaaaaggcctttgacaaaattcaacaacccttcatgctgaaaactctcaataaattaggtattgatgggatgtatttcaaaataataagagctatctatgacaaacccacagccaatatcatactgaatgggcagaaactggaagcattccctttgaaaactggcacaagacagggctgccctctctcaccactcctattcaacatagtgttggaagttctggccagggcaattaggcaggagaaggaaataaagggtattctattaggaaaagaggaagtcaaattgtccctgtttgcagacgacatggttgtatatctagaaaaccccattgtctcagcccaaaatctccttaagctgataagcaacttcagcaaagtctcaggatacaaagtcaatgtacaaaaatcacaagcgttcttatacaccaataacagacaaacagagagccaaatcatgagtgaactcccattaacaattgcttcaaagagaataaaatacctaggaatccaccttacaagggatgtgaaggacctcttcaaggagaactacaaaccactgctcaatgaaataaaagaggatacaaacaaatggaagaacattccatgctcatgggtaggaagaatcaatatcgtgaaaatggccatactgcccaaggtcatttatagattcaatgccatgcccatcaagctaccaatgactttcttcacagaattgaaaaaacttgatcttgaaagttcatatggaaccaaaaaagagcccgcatcgccaagtcaatcctaagccaaaagaacaaagctggaggcatcacactacctgacttcaaactatactacaaggctacagtaaccaaaacagcatggtactggtaccaaaacagagatctagatcaatggaacagaacagagccctcagaaataacgccgcatatctacaactgtctgatctttgacaaacctgagaaaaacaagcaatggggaaaggattccctatttaataaatggtgctgggaaaactggctagccatatgtagaaagctgaaattggctcccttccttacaccttatgcaaaaatcaattcaagatggattaaagacttaaacattagacctaaaaccataaaaaccctagaagaacgcctaggcattaccattcaggacataggcatgggcaaggacttcatgtctaaaacaccaaaagcaatggcaacaaaagccaaaattgacaaatgggatctagttaaactaaagagcttctgcacagcaaaagaaactaccatcagagtgaacaggcaacccacaaaatgggggaaaattttcgcaacctactcttctgacaaagggctaatatccagaatctacaatgaactcaaacaaatttacaagaaaaaacaaacaaccccatcaaaaagtgggcaaaggacatgaacagacacttctcaaaagaagacatttatgcagccaaaagacacatgaaaaaatgctcaccatcactggccatcagagaaatgcaaatcaaaaccacaatgagatatcatctcacaccagtttgaatggcaatcgttaaaaagtcaggaaacaacaggtgctggagaggatgtggagaaataggaacacttttacactgttggtgggactgtaaactagttcaaccattgtggaagtcagtgtggcgattcctcagggatctagaactagaaataccatttgacccagccatcccattagtgggtatatacccaaaggactataaatcatgctgctataaagacacatgcacacgtatgtttattgtggcactattcacaatagcaaagacttggaaccaacccaaatgtccaacaatgatagactgaattaagaaaatgtggcacatatacaccatggaatactatgcagccataaaaaatgatgagttcatatccgttgtagggacatggatgaaattggaaatcatcattctcagtaaactatcgcaagaacaaaaaaccaaacaccgcatattctcactcataggtgggaattgaacaatgagaacacgtggacacaggaaggggaacatcacactgtggggactgttgtggagtggcgggggagggagggatagcattgggagatatacctaatgctagatgacgagttagtgggtgcaatgcaccaacatggcacatgtatacatatgtaactaacctgcaccttgtgcacgtgtaccctaaaacttaaagtataataataataaaaaaaaagaataaaaggtaatagctgattaagtttagagaatactgattcttatcctttttcttcttctaccatttcctagttcggcaaccatgcaaagaagcgagatttagaaatggaatgttgaggtgtgtttaagatggtatttgtccaggctattcaggaacacgcaagccctgtcctcagctcaacactctctccagaagatcatcggagaaatgtgtacacagagaaacaaaggccaaggaaccctttattgttggctgaggttttgtcttcaaacccagaagcagaacactggtaaactatatagagccttctgcttcagaatagcctcgcagcaaaacaggctggtggttgtactaggcttgctcttttacttgaaaccaaacctgaaccatgagtcttccttctcttctacagtgaaaggctagaatatagctttcagtgggaaaaactcctgtcttgtgtaaaccaaaaagtatctgagacaagtctcaatcaatttataagtttattttgccaagattgaggacatgcctgtgacagcctgaggcggtcctgacaacatgtgcgcaaggtggtcggctacagcttggttttatacattttagagagatgcaagacatcagtcaatacatgtaagatgtacattggttcagtccagaaagcaaggaaaactcaaagtgggggtggatggtggggcagggagatgggcgtccaggtcatagatggattccaagattttcagattggcagttggttgaaagagtttatctaaagacctagaatccatagaagggagtatctgggttgagataaagggttgtggagaacaagtttcttcttatgcagataaaacctccaggtagcaggcttcagagagaatagattataaatgtttcttagcagacttaaaaaggtgccagaagatcagggaaaagacctggaaagggaaagggaatctctatagaatgtcaattatcctcacaagagatagctttgtagggccatttcaaaatatatcaaaggaatatattttagggtaaaatacttcagtttctttcagggccttctatgtgccatatgatgctgtactaaagtaaggctggaattttttttattgctacaataaaactcttttattgctacaaaaagtcttaaaatctctgtttcaatgttaatgctggtcacttgtgtatgaattccatggggaagagggtataatgaggcatgtcttacccctctcttcccatcatggtctgaactagtttttcaggttaactttggaatgcccttggccaagaggaggggtccatttagatggttgtggggcttagaatttttagtttacacttgatactcgaaacacagctggtgtaggataattgtcttagaattcaaaaagttcagataagccgcctacttccccatgtatggaataagggggatgctgctcaaaggtgtggggagggtggagataggaacagccttctattaaccaaagaagccaattgtaggcaacgtactagtctctaaccatcatgctctcagatttccagagtttgatactgtgtgctccacatagatatgtatagttcttggtaggtgaaacctatttcaaaactgtcccagtgataaattttcacaaggctgtctttgatggcttccttctacatcccagcccttgttggaggctaattttaacctaagaaaaatataattgccaaggttatattatatttatctaaagtaatggaatattagagtttgattaccattggagggtaaaggcaggaagataccaactcagacatagcttgggtgtggtgtgtacattcctataacttctaatctttataaaaatctttatgagttacagctgtaaaatatggttgtagtttttcactgtcctttattacccttaagtattccccaccaagggagtgctacatatatgccatatttgcagtgaaataagaatttattaagaaatacattgtagtatgttttattaaagtaaaacacacatatgggtatgcatagatagatgcaaaaatcatgtttacttgatgatttttcacaatgtgaacacacctatataattgtcactcaaattatgaaacagaacatgagcagtgttatatatttgtttttaaattcattaatctctagtttttattttcttcttttgctttctttgaatttaatttgctgttttcttatttgttaagataatatatttagatcattagactttagcttttctttttttgtaacattgacagttaaggcatgaatgttactgaatgcatgtttgcagcttcattccacaagttttgatatgtcatgtgttcatattatgagtaatattgactttaacaagtcaatgatataatatttttatctctaggacaagtattttgttttttaaatggattccatttaaattcccatcttgaaatcaatatttaaaaaatatgatgttatttcaaagtctgtgtctgataaccatagtatataattctcctttaaggttatttctaatttctgtttttaccccctcttgggattccagtcatttgatcttgtcttctgttatgtctaacaacttctgattaaatgtcagatataaaatatccatagtagagataattttatactctagatgatattatcttccttcagagattgtatttgcttttggctggcatttgggttaggggcaggtcaccttaatattcagcctggaattaagctgattggaagctgaatatagttcaccaagtgcataggcttacaaccatccacacagaatctgaatcttgggattcacagtctcagagatacccgccatgatagagaaatatagttgggcctatgaaacagactccgagtaaacttatctaaccagccacatagatgaagatgtcaagtctgtttttttctatttaattgtcttactgtaagagaaagaagtcagcttgcttcctgtcttcatgacactttaattttcccattagaaagaaagtccccttgaatttatcaaactctaattcatcaaattggccacattccctgaggtgcagagaagaggaataaataggcagaggccggaacctggtaaggtgagagaacacttctttctaccttaagagttaatattgttgtttgcatatggtaaatgaataaattcatagtcagagagcataaataacctactaagatgctgttagacctgggctctcccttacacttttgagtttcttggatcttaagattctacagtatgtaattattttctaacactattattttcagcactgcctaaaagccagtctcagtgagatttaaaggcagggtggccataataattttccttttaaaccaagacatttttgagaatgaaaagaggtactattagtcattacgccaggacaatagggtaaactgggactgttatgggccaactggtaggtatggtgatcttactttactactgatacagataccttctgcaatggaaggtcgtggaattgggtgacgttgaatgattctgagcttaccacatgagtttgtttgaaaaataagagctgaaaatacccgaagacaatggaagggtgggggacaggagaaaattagcaggacgaagagaaaataaaccaagaagaagaaatgaagagaggaaagaacaataagaatgccagaaatcagatatttgcccaggaaaacaggtgaatgttagcatgtggacatgaggcagggtaaatagaaaacaggtacagatttgaagattaaaatcatcatggaggggaaaaaataatgtatagaatgagatagcaatgggtataagctttgcaaaaagaacgagaaagtatactcaagtttagatgatgttataatatcatttatagcaaggacattgaagagcctacaggataacattctagtaaattagatttaaaggacaaattgtgagtattcctggttataaataacactttattattgatgcaattattttaacacatgcagaaacatggcagagaaaaggaggtagtgtttaaatatctgcccagtgactgaggaatactataatatcctggatctacaggtgatgctgcaggtctgagagcaatggtaaggaagctaggaggacgtaatattaatgatatgattatcccacccatatagataacctaaaatatgtgaactgctttcatagaaggcagaagaatccaagacctgagtggagtgtgaaagattgaactttaaaaatagctatgtgtgatgcatattacttgtgtatgaataacttttccatcatcacatagaactgtcatctcaggttaagcgacctcttatgctaatactgtgatagctgggttgttgttggaaaaccactcagaaaataagaaaggttaaaaaaaattgtaagataaaacatttatagcagaaggcaaaatatatacttctgagtaactatagcatcactatactctggaagaaagaatacaggctagtgtaaaaggaacctggaatgtaacatctggattcacagagctgatgttaatagcctggtaaagacaaaagatcacaaaatcagtgaactagtcaaagtatttttgaataattgtagtaccacaaggcagccatttaaaattcactcctctgaagcctaggttggctaaaggaatttttgtttttcactctgtgtgttcttgtagttgaccctgcataaaatccaggctggttattttttgaagaaacaacttacaatctataagaaaggaatgttcaacttcaccataggaattcagtccaaatgcatttattgagcgatatcaacctgatatgaaagccgtatattctattcttgttttatcttttattgttctttatattttctggtcctatttacctctttgtttaatctttacattttttctagtactttattattgttcacagtttattgtgtaagcctagaattggttttcatgctttagccattacttttcctttatgagatgttattgtacttggaaaagataatgtgtgaatcagtgtttgatgagccaaaattatgggagagatttttaaactttgacttagagaagaaccttttttgaactctgttactaggtgtgattggtgtgtcttgtgacctcccattggacagtgtactttttatatggtatttatgtttcttttttcattgcagcattacagggtgtctgttttctacagtgccttcttattactaagctttgaacattgtaggcacccataaagtctgaggacatttaagtacatttgagagtaggattagatggaagatgagaaaatttccatccaaagcagaattttctaatctgattctgtatcataatgtgctttatttatttcccagtgggatataaagcattcctaggtatactaaagtttccaaaaaaaaatctgtagtacagacagttgtttaatttcatttaacctgctgttcctcacatttatctgacaaatacacttttgtatctgggctctgcagtagacagaaatgcacctcaaattaattgaagcccaaaaggggatttagtggcttatgaaactgggaagaattcttggtgagttcacagaacagacaagctgcaggatgtcactgactgagactggggactcaacagtctttctcttcatccattttcctcttttgattctgctggtttcattttgggtgctgacctcaccctttcctggtgtggacagtcctgtgccctttcaacacgacggggaacaacctcagctgaaagggaacatgttgatttctacacttctaaatattgatttttccaaaaggtttcatccctgtgattggcctccatgctgtagaccaaccactcttgtcaggggaggagtttactaagattggctatatctaggtcttttgtccacatatgtggcctggataggatgtgtagaacccacttctttaagaagagagttaggaaggcttgttgggaagagcagaaataataaccatcactcatcattcaacaaatatttattgaacgtttttcctcagcccctcaggcacttttctagacattagggacctaacactgaacaaaataaatgaatattccttcttccagggagcttacattgcagtgtaataaaaaggcaacattctaataaaaatgaataaaaatgataaggaaaacagtatgtttgactacaataagtacaaggcagataaaataaagcagaagagtaagaagtatctgtggggagaagggagttaaaattttagtgtgtccagggaaagcctctctgatgagaaggtcacttaattaaatattggaaggaagtgaaggagggagccctgcatatatcccattcagaggacacagcagatgtgaaggacctggggcaagtgtgcctggtgtgtctgaaggaggacatagagagtagaatgtgggcatggagaagaccatggaggacatggagggtagagtgtgggcagtaggttccagatttaacctttaaaatccgaatttttgtgggcattttatggtcttctggtctgatttctagtgctacagagtccattccttcataatatttattacagctgaattatgtgcagagctgctgttcaggcaccacacatttttattttagaatagctattggtttctcttagctattgccttaaaatatatacttctaattttttagtgtgggtatagtgattgtagtactggtaaaatgatttatggaagaatataatctactgtgagataatctgcatgtgttgtgaatcaggtagttgctgtgacaaatccagtcagtaggttccagattgaaccttaaaatcctcacttcttttgggcattttatggtcttttggtctgattttagtgctacagagtccattccttcataatatttattacagctgaatgatatgcaaagcaaatgtttgatacagtggagaatgaactgatcttaccttgtgaaacttggggaaaagacactttggcaaaaatgtgattcagaaatgagcacttatgaagttcccaaggaattgggctgagatagtaggaagtcttgtgctgagctctaaaggctgtttataaaaagcagacgtgaggaaaaggcaatttttgataagaagtgtaggagtgtaagtatataaaacagaagaggattatggtcaggtcacctgcctaactcgagcaaggagtctgctagagaaaatgggaagtaaaatcagattattagaaagctttgtgttctgtgttaataacgggaactctctctggagagagtttgaggaagattattctagaaatgttgtgtcactttgggccacttggccatattccacactctgctctgtgttataggggacaatttataattgcaacttccttaggtaataataacagtcttggcaacttgatgtttttttaggcccttcccatggatattcttttcatatctgtaagatgtaaatttttttaaaaatattagtatttcttgaaggattaatgggagaaactttggaaaattccctactgcttagaagtgattttgtttgtagcatgtaagatatatataccttctctttgcttttttttctttttcctttcttggtttccactaaattcttagccctaagttccttgcttttttgtctcagctttcttcttatatgaagtatcaaatttaaaaaaatctttaaaaagcctacagagggtgatggagcttagggattagttctcatgccacttattttccctaattaagaactctgaaatggaagttgaaaatgttggtataacctttttattaatggggaaatggggtcatgcctgccacttccatctccacaacaatccattgtataaaatgttaagttcactggtacttttgatttgaggggagagacatttatattggataagtatatatcagaagtctgtgtcttttgaatggtcttccgaaattcttatctccattcttctataattgttgaattattttccttaagctgtactgcagaataacacctataagataagctttcaaagtgactgtgttaagcagccttcattctccaagaaaaccactttgtgccttcttttctcaaaacctcacacaacttcctccccctcaccattagcttactagtatttcactgcaaaaataagtcctcagaaacctgcatcataatcccgccaaatctcccaatcacccccattagtctcatctagtctgccttccctagttagtattgataaactctgtgtgttcccatctaaagctaacttttctgcctgtgatttggatattgtctcttttcagtagtttaaagatacttaaactgcttctgcatttatcccctatctctcctgcagcattaacctgtctctactagatcattctcacattccaaaattgctgtaatatctgccataaaaaaaagaaatctgtaaatttgtttaagtttcttgtagattctggatattagccctgtgtcagatggatagattgcaaaaattttctcccattctgtaggttgtctgttcactctgatgatagtttcttttgctgtgcagaagctctttagtttaattagatcccgtttgtcaattttggcttttgttgctattgcttttggtgttttagtcatgaagtctttagctgggaggcaggaggaacttctctaagactcaggaattctacttttagttatacatattaaacaatctcaaatattgaggtcataaggaaaatattataaggtgttcattccaacactgcagagatatttataactgccaaatagtaggatgtataagttgtggtatatttatacagtgaagtagtatgcagcccttaaaatgaatatagtagagctactttcatcagtgtggatttctctcaaaagcataatgttgaattagaaaagcaaggtaaagtatgatgcattgagtatgatactatttataaagagcttgaatgcctgagaaacaatactatatcatgtgtatgcccatacacatgtataatacattttacatgataattataaacactggttttagaaccctagggaaaaagtgaaggaaatggagttgggatgtactcaactgttggtgtgggatgttttttctttaaaaatgaagattgaaacaaacatgacgtaagggtaagatctgataaagttgagtggttgatacacaggaatttgttattacatactctattttacagctacttttgaaatttttctcaggtaaaaagtataaaactaacataatacaacaatttttaaaataaaatgattgctaccaaaaaacaacaaaaaaaacccttcagactggtagctttaaacaactttaaagcttgagctccttctaaatttcccaaagtctttcagcactctctttcaactgggcctcctcttcagaagtcacctttatctttataagatctgtagtactattctgtcctaggatacaaggaatgctaaggaatgttacttcatttatcccataaaagctctcaattatgatggaaactggatgcaccctcttaagattattcaaagaggaagtcaaattgtctctgtttgcagatgacacaattgtatatttagaaaactccatcatctcaggcccaaatctcctcaagctgataagcaaattgagcaaagtctcaggatacaaaatcaatgtgcaaaaatcacaagcattcctatacaccaataatagacaaatagagagccaaatcatgagtgaaatttcattcacaattgctacaaagagaataaaatacccaggaatacatcttaaaagggatgtgaaggacctcttcaaggagaactacaaaccactgctcaacgaaataagaggacacaaacaaatggaaaaacattccatgctcatgaataggaataatcaatattgtgaaaatttggccatactgcccaaagtaatttatagattcaatgctattcccatcaaactaccactgaatttcttcacagaattgtaaaaaactactttgaagttcacatggaaccgcatatccaagacaatcctaagcaaaaagaacaaagctggaggcatcacactacctgacttcaaactatactacaaggctacagtaaccaaaacagcatggtactggtaccaaaacagatatatagaacaatgaaacagaacagaggcctcagaaataacatcacacatctacaaccatctgatctttgacaaaccagacaaaaacaagcaatggggaaaggatttcctatttaataaatggtgttgggaaaactgggtagccatatgcagaaaactgaaactggatcccttccttacaccttatacaaaaattaaatcaagatggattagagacttaaatgtaagacctaaaaccataaaatccataaaagaaaacctaggcattaccattcagtacataggcataggcaaagacttcatgactaaaacaccaaaagcaatggcaacaaaagccaaaattgacaaatgggatctaattaaacagaagagcttctgcacagcaaaataaactgtcatcagagtgaacaggcaacctacagaatgagagaaaagttttgcaatctatccatctgacaaaggactaatatccagaatctacaaagaacttaaacaaatttacaagaaaaaaacaaacaaccccatcaaaaagtgggcaaaggatatgagcagacacttttcaaaagaagacatttatgcggccaacaaacgtgaaaaaaagctcatcatcactggtcattaaagaaatgcaaatcaaaaccacaatgagattccatctcatgccagttagaatggcgatcattaaaaagtcaggaaacaacaggtgctggagaggatgtggagaaataagaatgcttttacactgttggtgagagcataaattagttcaaccattgtggaagatagtgtggtgatccctcaaggatcttgaactagaaataccatttgacccagcaatcccattattgggtatatacccaaaagattataaatcattctgctataaagacacatgcacacgtatgtttattgtggcactgttcacaatagcaaagactgggaaccaatccaaatgcctataaatgatagactggataaagaaaatgtggcatatatacaccatggaatactatgcagccataaaaaaggatgagttcatgtcctttgtagggacatggatgaagctggaaaccatcattctcagcaaactaacagaagaacagaaaaccaagcactgcatgttctcactcgtaagtgggagttgaacaatgagaacacatggacacagggaggggaacatcacacactggggcctgtcagggggtcaggggtcatgggagggataatattaggagaaatgcctaatgtagatgacaggttgatgggtacagcaaaccaccacagcacgtgtatacatatgtaacaaacctgcacattctgcacatgtaccccagaacttaaagtataaaaaatacttttgcactaacctaatagtaaaacatgactagattaatcagctcatacaatgtgaattattgaccagtatgaaacagagaccaaagtcagtgctggctactacttaggagatgcaaagataattcctctgatggatttctagattcatttaattgcttaatgacttagagataattaattctcaacaaatattcatttgaaataaattctgacaagttgtccataatccttccagaattcagtaataaatcaaatgcaccttttttttttctccttgtaacttcccattgacagtgtcatgtcattaaaacccaggctatgtgtggctgctctttcccactgcagtgaaagacatttcaatgggaaatgagtttgcctattaaaaaatgtttactgttgttttctattaaaaaaaaagattcttcaaaatactttctgttaaatcagctacagataggccaatggtccaattagtacaacctttcattttaactatctcatagccacaggcaatcacttctttgtggactttttcccactgttcaggatctttatcagttcctatatctgagttcagatccgtcagagggatgccagcaatattgactccactccacacaggaatacttgagtccctatgctgtccaagaatccacctatgacagctttcagagtggatatcaagcctttgcccagtgaagaaacggaaatggggagtgtccagattacagccacttccaataacacggttttggggaaatacactcaatttccagaatacataagttacaatatccagtaaattagaaactactatcagtttgtggtggggattgcatcgggtaatactggaaataattaatttaaaaatgatcacatttcactggactatatcaaggtgtgtttctccttttgctggaacacctgctgtaataatgactaagttggactttgcagtgacactgtagtctttgctgaaaacaatgcttggcatttttatggaagggctgccatgttgaagatccgttgtctcacccttcaatttgccttcgtcaacatccacaaaggcaagtttatcacccaaaccttttaataagatgctgagagcacaggccatgccaactgatccagttcctataatggagatcttattgggatgagcggccccctccaaagtgaaattcttggcaagttcaagcttgacagtcaccatcttggaaatgggagtgaaggtccagccgcccctgagtgggatgtgtgtggcctcgtgggggcactgagccagcccccaacaaaggaaatgagctcctgcagcacctattctcttgctggtgggcagaactcctgcagctcagctcatggtcgttagctcacgcaagaggcaaatggatgaaagcagcggcagaaatctccttgaggtgtggaagaaaccctgacggtttgaaggcctcctcgccctttgctactgtggctgcgcaaggccactcccagctcgtgcagggctcacagagacctggccccttaatatgttatttttagttttacaaatatgtggtattttttacaccattaagacggttccgaaaaaatggactgtgatcattaaggccaaaagtaattttagctttgcctttcaaagtgccatattttgttgcttagagaagcgctgcacctttgcaattatttttgtcatggtgctcaaacacgctgaaactaagtacgatagatgcaaagacaaagagatgagaattccaatctccactccacacttggactttgaagaagtttgactatgtgagcttcttttaaaaagtcaatattacaatgtgataataagacttgtcctaactactttacaaggttcctgtgagaaagtcagggtgaaaagtctagggagctttaaaaagagtattgtaactatttgacaaactatgtcactgagtcagtgacaaaaccaagtcttctgatttttccttcttcatgaaaatgatgcattaaaaattaaagaaataaaagcttagaagtcctcaattatctgcttttttgaagataagatagtcatggataaatgcaatcattcgataactagtaatgtttagataatctcaaatccttctaccagaactttaataacatttattcaaaatcaaatatctgcctctttccccaatcaccatctcctttataattaaaaagtgaggactatgaaaaacaagaaggcttaacccatgaattaaaatgatatttctctaatatactgaaattttgccttatgaatggttaaactacattttctttaagttggcaagtcttaatatgtgtttacctatttatattatcccaaataagaaatttgatggaatcttttcacttctcaaccagttgtttaatatttggtatcaggatgcattctatttgtaaatataatagttctatctcagaaaaaaaaaaaagaaagaaatctattttattctctcctcccctagcttccccatttctcagctttttttgatagcaacatttctcaaaacaattatctttactctctggtgtccactgtaacagctcttgtcaagatccccagccagacacagtggctcacgcctgtaatcccagcactttgggaggctgaggcgggtggatcccgaggtcaggagttcgagaccagcctggccaatatggtgaaactctctctctactaaaagacgaaaaaattacccaggcatggtgatgtgcacctgtagtcccagctactcaggaggctgaggcagaagaatcacttgaacccgggaggcaaaggttgcagtgagccgagatcgcgccactgcaccactgcacttcaacctgggcaacagagcaagactctgtctcaaaaaaaaaaaaaaaaaaaaaaaaaaaaaaaaaaaagaaaagaaaatccccagcacctccatcttgccaaatttattcgtccattcttagctcccatcttacctgaaccttcagcagcctgtgatttaactgattcactctccttattgagctgtttcttcacctggctactggtgaagtcttggttttcctcccctttttcagtgttctctgcctatatcttctcctattcctatacaaattagggtgacccaggacttaactcttacccctctgctctatctacactcacagccaggattgtgccatcctttcttatggtaccaaatactgtttacatggtgatgtctctcaaatttacgtcttccctctccgtctttctgcttgggcttttggtaggtaattcctgcctaaaacttccaaaactccttattgtagcctattgggtcctacaatctggttcaccccttacctatgcaacttctttgcctgctgttttctctcctttgttccttcagcttccaccacatttggattctttcttatcttgtaactgccaagcagcttcttctcacaaagtctttgcatttcccattcttttggcctagaatgttctttcctccaatttttgcatagcttgtatctttactccagtgtcaaatgtatttcttcagaggccttcccctatcaccctgtctaagatagtaccttttttacttgttttatttttttttcttagtacttatcagcactttatattttatttttcctctgtggtaatatgagtctaaagagggcatgtaattaatctatccacccctgtttccctaaggcttatagtattgcctggcttatagtagattttcaacaacttttcgttgagtgaatgaatatataaatgaatggagttgtatgatacattattgttttatatgtaaaccatgtgattaatccctcaatatttttgaattcaaggtacagataaatgtttactataatataatgtttaaacataatgtaaaagtggctagctagaacatgttgcatgtcaatttgtaaaaaggaatttcctgtgagtgatacatgggaaggccctttttgttcccttctctggaactaatagtaattccacaggaaccttgtggaactaaattgtgtttccttggttcttctcatgcagctgaagaataagttcatgaaaaaattgccacgtgatgcagaagcttccaacgtgcttgttggggaggttgactttttggatactcctttcattgcctttgttaggctacagcaggctgtcatgctgggtgccctgactgaagttcctgtgcccacaaggtaagctgctctcctacctggggtctacaatgtgctaatagggttatctcctcccattcaggctggagaatcaatagaatgaggaaatatttagtgcaaacacattggagaggtttaacttgaaataatgactgtttgacttttatactgtcaaatttcttggcacttatatagtaataataatagcaattataatagtttattgggcagtgtactaggttcttcttttggattattctacttaatccttacaataatattttaagggacaaactatagttatctggttttacagatgaaaaaaggtctaagagtttaagtaatttgtccaaggtcatacagttagtaaatggttcagaggtcatagttgctttcatttactctgttttatcagaaaattggtagtaggtttatacacacatatatatattaaaatcatcaagctgtatacttaagtttgcatacttcactattaaatgttgtgtcacaaatttttgttttaaagtgaagtatattaatgttattataatcacgtactcatttcactgcatagtacctgagaagtcatcctcttcatccgcctctgaaactgagctccacagagttaggaagcttgacctgggagtgcaattagttgactagaagttaatgtttcacttaaatttgtgctgcagacagtttaaagaaaacttgtagtcttcaggttgacagaaaattaaaatatgaataggacttttttttgggatggggggtgggggagttgttttctgtgggttccagggcaaggacaggttcctttaggtttcctcatgtgagcaggaagggctatgaatcctcctcagtgatagatggatcctcctcagctcagacggtctgagcatgattaaccaacagtgtaaagaggctcaagatttctttagagcctggttaggaggaaaattaagagaaaatttcctttaggcttcttaattcatagattgcaggctattcttcctcatcatacaggtattttttaaacccatttttatatttcttagacacttaaaataggaatgatacatagggctgttattggacaaatagcagtggaaaagagatgatcatagcttattcacttaataggattatgatgatttgtgttttctgtaacgtagctttttgcttgaaaacattccagcagagccttgtggttctatctgtgcagtcacctggcgaacagctgactcagataatggctggagtccagctctgtgcccctatggctttatttatgtctctctagactaactttactaggggttgaaagaaaaaaacatgcccagaagtgttaaagaaaattgctcttggcttttcatttttattaccatttttctttagaaggtacaaataaaaaatgctttaaaagacttttatttaacaaaatacgcattcattgagagcaaatcatgaccattttttgtgtcctgcttatcatttctttctgtctggctcactaacttttttcttttataatggatggtagggctagtgtagaggtaaaatacagcatcacttaaattagcaaaaggagccaggcaattcaaggcaacgtaattcaataatattatataactatttcagggcaataatctgaacgatatatccttgcatgttaacatttttccaggaaatagcttcatccatttgctgtcctctgaactagtacaagccttaatcactgagtagggagtctcattagctttttgtgtgtaggtaatgtggggtcatttacagtggctgcatcctgtgaaatccaataaaggaaatcccacaaggaatgtggtaggcatggtgaaggactgcatgtacatttcatgatatgttttaatgtgcatgctactctatcgtactgaaaggaaacctgaaaaatctgtgtttgtgtgtatctttttatggtcatttttctttttaaaggtggaggaaagttatgctgccattattatgattatttctgtttctaataaacagtattactaccatgcaccttctaggaaatatggctctagcagctcccatttcttgtgcggagttcaccaatttcattatttactctcttacttgcttgatctgttttagcctccacttacagctggatgactatcaaccgggtgaatgtctatctatgtaggggcccctcttgccattcatgtgaaaggaaacaaaccctattctttgatctttggttactggataggatatgtttatgattttcctagtatcttacaggcactttgcttgctgtcatcttatgtctatccacagaggccactactctctctctctctctctctctctctctctctctatatatatatatatatatatatatatatatatataaattttttgaaggggggtgatagagtcttgctgtgtcacccaggctggagtgcagtggcgtgatcttggctcactgcaacccccgcctccctggttcaggcaattctcctgcctcaacctcctgagcagctgggataacaggcacctgccaccacacccagctaattcttgtatttttgtagagacggggtttcaccatgttggccaggctggtctcaaactcctgacctcaagtaatccacccgcctcggcctcccaaagtgctgggattacaggcatgagccaccgtgcccagcctcattcatatttttgagctatataggggatgaatgttcttcttataccattttgcagttgagagatgaaggcaaagggaagattcagcatcagtgctgggaatagaactttaaatagatttctgaatctgagacaagagttttagggacagcctagggagattctagaaaagattggaataaaatgttttagggttctcttataaagaagaataaaaccctagtttgtgcttttctaatcttgatttgcacatgtaaggtaattggttattaagtaagctccagactgttaaaaatttagaatgtttaccctcttagtggcactgtaagataatatatatatgttacaaataattatttatctaaaagaagtagtttgtgattaattgtcaaagccattaaaaaaacttagagggattgggatggagatcctgctagttcaattttgtcacatccaccagtttaattgctagctgctattaatatttaccgcatgtaatgcagttggttatggtgggtttgtggtcctcatgaatccattatggaagccacagtttagccacattttccaaagctgataaagatgaataatgggttattgaattcactgttgttttgagagaaggatataaaggattggtacatgctgagtttatgctagaaatagctgtgatgtatcaggaaagaggggggtgcatatcttttccgaaaacatcaagtggtttaggaaggctagctccttttctcatattatgctctgtttctgcttataattattttgtgaatgtgagtataggccgttggttccggacacagattatttggttaatacatccttttgttgtggagaatgctggaggcatcttccgcaggcataattaactatatgaaaaaactcagaaaagtagaaaagggcctcatgaagattattcagataactagacgctattaaaaattgtaactctgacttatttatttatgagtgaataaaaagaacttagtaacataaattaatgctttttttttccaagctgtcaaagtaggctgtgcccttgcagccacacaaatgtgatgtttactctaatttgttaatagagaaaaaagcttctggataaaaataacatctgtccattgacaaaaaacagcttgggtcatgaaaggagttttcagtacattataaaagctgagtttggcaggatgtacttcaatcataaaagttgtaacagctttcgcttctttgaaggttaaaggagagaaaacatatttcaggcagagggaacttcaacttgttggattgttttgtgttcagttttctcggatttctcatcccatttcaataatgcagtccagattagaagcttcttaaaggtgtccattcctccagatgacatttttggcttgaggttatgtttcctgctgcttatgaatgcttggattctctctatttatcattttaaggaggcagatttactgaattattcctgattggagtaatgtgaaaattttaactggtatgtccaccatgttggtttggcccttggtgttattccattaatgaagaaataccttctttaaaaaataaaaattgcattacccaggaaagaggaatactacttttatatctgtgttactgaaccaatataattctcatatattgtgtttattgctatcgtgtagacaccattgatctgctgcttcctttcattctttgactggttctatttagcagagaacaaagagtaaatattttatagaaaatgtctgtcctcgtctcataggatgtaacttggaggctccattactctatcagctattggaatacccactgcctgccaaagtttatgtttgaggactattaatgactgagaatgttttttcactaactagacaatgttttggctttgttgctatatagtcaacctgataattaactcattatcagtgtcagttgataaatacatttccataatatgtatttgtaagctataatcatgatggaggtgctagggagaggtaggaagagatacagagtgtttggaaaagttttggatattatgcattactgaaaagttaatatttagatacatgaagataataaaaatggaagcagaagaaatctattatttaaaaatgtactaaggatccaggtgttagatattttctcttgtggcacagcatctgccccttttcacctaaacccacacccttattgaattgaaacatgaccatctgtagtcaggcaaacgaaattgagaaatgtgaccagtacttatgtttctcaatgggattaaagcattattttgctttaatcattaaatatattttgtgcatgttgcactcaaatcagtgatcagtccctttagaaaaatacactttacagtcctaaagaagcactttataatactatacgtagtggcatataattaggggccagcttcgaagggacaaaagttctagtgtcaattgaacttcagtgttaaaagagctgaaattcaattcaaataatgacttccttcatacttgaacagactttggtgcctgctgattgctatctactttggtaacacttgaaagtgagtgtgctgcttcacttcagagctggtttctaagcaaataagtactaagtggttttatggttattctggtataaaacctgagtattcaaactttcagacacctttttacattcttcatttctgggattttagaatcccttttgggttgaattttatgataaaaaaaaagtaattatacattcaagggcattttggaacagacccaaacattttttaaagtatttgctgtcaatccttttttatttgaagtgagggatataaataagtaagttaaaaataaaattctgctgagcaaaatggcaagctgtttctggtaccataaaaatcttacctaagatttcttgtccctggctaagcatccagaagtgacccagagtgacctatggaagacttatggaagtcatttttggacttctgttaaatcacaaccttggtatatcagttgggcaggtagtattaggcagaaatatgtggtgaaaagaacaggaggtaagaatgcctatatatctactctttgtcatttactaggcacagatcttgggctcttccattaacctccaccagcctcattttcctcaccattaaatgggaataggatactttctttactgcagagggtcatatggaaatgtaaataaagtgatgaatgtgaagtgctttggaggccttataagctgggcaggcatatgatgttatcatttttattgtcctcattatctccccgttaggtgatacatgatcaatatcaaggtgggatttatcccacgtcaccttttgtagatttttttgtaaattttttcttactcatttactcatcagatccccgcatccacagtgccaacatgccacagggcaaaggccctgtgtgataagtgagggattttttccaacttggttagaggtgaacctaagtggggttaagtttgttattgtatgtttcaggacctgtttgctatgaagcaatgttttgtgcattatgaagaaaaaatgttggtaaatgacaagaggacacccacaaaataattttgactgtctgtgaatgatgctttattttgaatttctctcatatttctcttcccttactttggctgtcaccatgtggcttacttgtagaggacttggtttttgctgattcccagtcacttctgagtagacatatttcttaaaagtgtggagacgatcatctgtcactgcccatattgggtaaggaaaagtcagagaaatgtgaagatgcactaactctttctagttattgtgcttgatgggtttgctccaaagattctgaaaatcagtagaaatggagagagaaaaaaagtttaaaatagaaagattgaatgactcatattaagcacttgaagtgcacctttcctgctcagtgaagaagcttctcaggtttctatgctatattctcatttgcctccaaataaactgaacaatgaactgtgttttgcaatagtgcgaaagagtatattctgtactaccaataatatattacctttgttttaaaggtgaattctagacctaacctttttatgaactaagttaaacatttctcagttttatgtatgttgagtttgatgaaatgtgtgttatagcctttgcttctttccttttccattaggttcttgttcattctcttaggtcctaaggggaaagccaagtcctaccacgagattggcagagccattgccaccctgatgtctgatgaggtaggaaatcaggaagatggagttctgtgaatgtcctacttgtttgttgtcatactgtgaattggctgtcacaatttattcaattagaattatgtggttactagacttccttatagcatgaggtacggtcatttgagacaaatgagctgaatcctatatggtttgcaaaaagtaaggcatgcattttggttttctatgggattctaaactctgttggaataaaacatattttcctttcttttaccaaacattttcatttcttaaaactgatatatgtcaaatattctttaaaaagttcaaagtcagctgggcatggtggctcacgcctgtaatcccagcactttgagaggtcgaggtgggcagatcacctgaggtcaggagttcgagaccagcctgaccaacatggtgaaaacccgtttctactaaaaataaaaaaattagccaggcatggtggtgcatgcctgtaatcccagctactcagaaggctgaggcaggagaatcactagaacctgagatgcagaggttgcagtgagctgagatcacgccactgcactccagcctgggcaacagagcgagattccatctcaaaaaaaaaaaaaaaaaaaggttcaaggtcattgtattaacttaaactttatctcttgaagttttaatacactaattctgggaattcaaatgtctatattctatattatttcagaaatgatgggttctataaaataatgtctaataaaatggataatgcattttttcttaggtatcagaaagtacatgttttatggttttcttatttcgtgggaaggaatgatacacatctaaaaatgcattagcaaccattatggcaaagtatctgtacaggttggaattatgaccccatttattttcataacagcctggatgttacatgcattttagatatgagaaaattctgaactattcccataggaggagaaatactgttagaatacaggatcattagtttctgctcctgggtctttctgggcttactatttccccaaatgtattgcttttgcttcattgcttgatttgtcggtttttctgtgtgttaagtggagaaaggggtacctttctccttagttatagatgttccatgtggtgattactcaggtagctattttattctgtgactgaaagctttatggctatgctgctttttcccttcaagggaacatttattttattcatctcagtgcattcattttattttttgcatttttgtaatttagatctgttttaaaaaatactttctcctaagatgtatcaattaagaatactttaacaagtgagatttagagtggcttaaacaatttgggatttatttggaagtttggaggtaggtagttgctggggttattttaacataacggcttaatgataaatcaagagctaaggctcttgctaaatttatgatcttaaaatagcatgttttcttttcctgtcagtatggtaaaacgacattgcctaccatcagctccagtcatcttatctgtatttattcaaagtaggaagaacagtgtggtaatgctagctgtatctccctttttaaacaggtattctagagctttcccagacagcctttttcttatatcttattagttggaattgttcatctttatctgcacagttggctgggaaagtgaatctgtgactttccagcctctatcatgagaaacagcaagagaaagaaaataaggttgaggatggctatatcagccacagattatgtgctggcattttgtgtcaccctcccctcaaccccacaacccccagactgttaaatgttacttaattgatagcttttaaaaattcttttcctagagaagtggtttagtcacaatctttaagaataggtaagggtattgaacagggaccatcttctcttctgaagactaaagaatttgacttatgaagtatgaaagacttaggttatatgtaaagaaatttcagatcatcagctctgttagaaaaatggaatgattgacagaaagattgtgtacattttggaacctctttctttggagatctgcataaaagatatgaagcacttgctgcattagatggtttagttgttgtcttgctaaaagatagacagatgattgactatttaaggccttttggttaatgtgctgccgatataacccagatttttcttttttaaatatctcacattgtgtgtttgagagctcagtgtttgggtcttaacccgatcttaacactcagcttgaacttttccttcttgagttatcagcaatttttatcccagtagtttttatttcagggaatgactcttcagtatatttctccaaaccattttaatctggctcccatagcaactgtatcagtagtggtacataccagtgggagctgaaaggcaatgttgttttatattattggtaggaaaaaaaaccacataaaaacatagctgtttcttcaggcctctgcctctattctttgaaatcataatctgaatgcctatattttcggggggcaggctgaataatagggactatcagagcatggctggattaatattaatagcacagttgttatgggctgcattcttcaggcttgatatggtgtgaagcatgtacagagttatctttttggatgagcacatcttttattattctttaggtgttccatgacattgcttataaagcaaaagacaggcacgacctgattgctggtattgatgagttcctagatgaagtcatcgtccttccacctggggaatgggatccagcaattaggatagagcctcctaagagtcttccatcctctgacaaaaggtaaattataggcagttgataattttcagtagctgagatgactctgagaaggaggttgtgttaaaaaaaaaaagtgaagtcaacctgttgttctaatattttcaggttcctgtttaacttgatgtattttctcaaatggatcacttatgtgccttggtttcacgtttccttggcattgtaaaataaatgttatgtggtatgatgttcttcagttattataaattggagatctcagattactacatgggaatgtatcacagacatgctttggcgatgttttggggaccccctgtatatctggaaacataaatttactgaagatgagtccttgtagatgtacatggttaagacattgggtaaaatagttgaagagaaacaattttctagaaatctattttttcccagttgaagcagtttccctcttttaagacatacagttcattcaactttcctattcatccagtcatttgtattggttctaaatgtaacacttaaagaactgtctgttagatagcagaaagaaataacaatctttcaccttaagggttttcactccatctccccattagccagagcatgatacagctaagaagcgaatgaataaaataaactaatatactcttgggctctgttgtcttgcttagaaagaatatgtactcaggtggagagaatgttcagatgaatggggatacgccccatgatggaggtcacggaggaggaggacatggggattgtgaagaattgcagcgaactggacggtaactgacagtttcctttgccattcatgatgaggttctccttaaatgtaaatttcccttcatctatcaacatattattcactagtttgttcatctgttcagccaacaaatatttatggtatacctatttgtcacaggcactgggaatatagcagtgaattaaatgatactgtattcccataaggatcttatattgtagtgacaagacataaacagtaagtgaataagtaaatgtggtgatggttttatggggaaaattaaggcagaagtagggactttgaggatgggagtattgtattccaattttagataagagtggtcagagaaggccttacaaagaatggcaacatttgaagaaagtgctacaggaggtgggagacagaccaggtgggtgtggtgggtgtgtgggggtgggctgcaacagagtgcctggtgtgtgacagggctggcatcaaagccagcaagactagaggggaatgactgagggtgtgttagggtcagagagatggcagaggactgacagatgtaccagccttcacctcttggctttcataattccatttctcacctgtatgtgtattcaacagtgagtagcatgatataggaatgagttctcactgttctgcctccttagcctgcaattgggaattcaggtttcctaaattgcttcagctaatttctttccatgataactcttccttccctaccattagattgttccttttattgggtgttaagtaaaattttaagtgggatacttattttatgaagatatggctttttaaaaacactgcagggtttttttttaacatgaaaaggtatgtcattataatatgcaattgaatgtgaatgaaatgaagttatttcattctcctgatgacccacttggatttctctctcaaattaacaggatattattcctctgtcctttattctgaaaggatagagaacataaaatcttctctcctctcctcccctaacctttttttgaatagttttttgtaaattatttccattaggaatatccttttctttttttacagacatgagttctgggctttaatttttaatttaatcagaatatatttcattcttttatatttcacctttgctaaactaattgaatgtctgtagtatgcctggtaccatgcatagccctgtgaatactaagaaaactgaagcagggcactgagtgcggctaaggtccagtggttgtgcagacagatagatggacgatcctaataaaatgtaatagccaagagtggaaatatgaactgtaagtgcaaggtcaagacttcggagagctgttgagcttcagaatagggcattctaggcagaagccctggggaagactgaggtttgaggcttggttgggagggtgagtagactgacgtgcaagtcactcaactgacctgctgacatttgtcatgggactcagctgcatttcctcccatcacacacctccatggcttcctcccttagttccttcaggtccttaccctaaagtcaccttcttggagaccttttctggccactctatctaaaatttcaaccaccttttttccagtactacataatgctctttcccatttaatttttcttttgatttttatcactatgtgttgcatttattcatttattgtctgcctccttttcatccccagagtaaactccatgaaagcagaggttttttgatgcatgttgttcactgttatgtcctcagcactcagaagagtgccagagtgtgggcatatcgcaggtgctcagtagcatttattgaagatgaaagaatgaatgatgaataaatgagtgagtgaatggatgaatgaatgagggtggaaagggtactatggcgagatgatgaagggcctttatatgatctgcttgcatattaggacgtttttctctaggcaatgaaacattttaatgtatttacacagttcactcttttctaaagaccaactggctgatcttcaggaaatgtgacacctaatttggtgacccaaaaagaaagagatagaagaaaatttattcctttatagttttctggtttcatcgtaagtggttaagtagtatcttgtcactgattcaagcattttaaatatgttgtgtttgatttaatgagttacctcttgattaatttgatggtaatttactttacatttagtggatgtttgcattctctctgcccaggttctgtggtggactaattaaagacataaagaggaaagcgccattttttgccagtgatttttatgatgctttaaatattcaagctctttcggcaattctcttcatttatctggcaactgtaactaatgctatcacttttggaggactgcttggggatgccactgacaacatgcaggtgggtatggttttgaggaggacacaaatagtacagcccagattgccttcctcacccctacagctcagttagaagcagatggcctttcagttactcagcgtgattttctttcttttgctggatgctgcattttactttgcttctggcctgctgctgtatttccagcattttagtaattataaaaatagctcgatgaaatctggcttgagtcacaagtagggaaaggaagggaaggaaatgaggatatacaattctatttgggcaaaagcatatcagctgctttaattttgtacagtgcacaaggtttagatcttctactagtttgactatgtggaacatattctgttaaacttgatgattacactttctttgggaatgtatgattagcttaattttacacatgagcaaatagcttccaaccattgagcgatttgctcaaagttgggtttgcatgtttaccagtataatttggttttaatgaatataagctaacagttatatctcctgcaggtggacctgattctcattaagctgtaacgactctggcttgacttattttgtatgattaattgtaaccacaattagttggttacttctcagatagcattatcttccttttgcaacaataataaagttttggtgatagaaaagatgtgtctgattccctccaccaaccagaaaaatatgtcccaaattacttttagttggtccaatccttttcagaaaagctattgtgctaggtgatgaatacgagtagtgaatgaagttatattcctatgaaaaggaccagattgaagcccttttcacacttttccttccactttactatatattattgtataacctatgtggtattcataagtgatgccagccagcttattttttttttaaatgcagctgattccataggattgctgtttttctactttggttttctttcctgggcacatgcatattttagatttttgtctaaatacaaaaatactatggagattataacatctatgttgacctaagtaaaaagggagaaattatacaattgtattttagtttgtcaagtgcagttttatcttttagttcttatctagtactgcatagcatgttaccccaaaacttagaggcttgaaacaaccattttattactctctttcatggctggatggtgggttggctcagctgagtggttctctctttggtccctcattcacttgcagtcagatggcagcagaggttgaggtcacgcagcagcttctttactcatgtgttggtgcctaagctaggatgtccagaatatttggggtctggatactctccacacgacttctccacatagctaacttgggctttctcacagtggggggactgtgatgacgtctaagagctcatgctccatcagaaagaggcagttgccactcagctttgctttttcccacataaatgtgtacgcagtattgcttcattttctgatcttcaaagagaggctgaaaattctgattcttagtgaaaccagtgatttttaaatattggcaactgattaacattttaggaaataatatcgtgctggtcaaagaacacatacctctgtgttaccagtgagagatctgcagcatgggttatgagaaccaactctaataggacatagagatgaaatagacagagcatgtttttctccttttccctcatttgtaagacaaaactgaatacattaaattgtagtagtgatgtcagtaatagaatttttataaaatttgatctatatccaagttgggcagctattcttcatctaaatgacagcgtaaggataactaaaacagatcgttcaagaaaaaaaatggagaagatggcactggggaaacaccctacggccagcttgaagaagttaatacaggcaaccacatgttaagaaaatagaagaaagctgtgattttgagagggcggtaagaacaaaactgtcttccgtctgtcagaatgtatagagactttcttgtgttgtgcagataatttttaaactttttttgatggacattctcattgagatggggacattgcaatattgcctatgtgtattagtttattgccttttttgaattgaattgtaattctttgcaacctcataagacttggctttacaatgctgcatctgactgtagagaagaagtctgttcagatctgttttgatccctcctagatggatgaacttctttatgagtaggttttgggaaagtagagcactctattatgtaacatacatagttaattggtatttttctcctatgtgatatatgacctgggaaaggccttgctggtggaattagctattttctgtgttctaaagatttcaagaggaacgtaaatactttcagtgcttcaggatgttaagtagtccactaaaataaccatttgctggatgtgactcctaagagctgactttcaaatttatggggaaattttccagatgtaatttgattattttattaatagattttttaacctccattgataatttcactgaaactgtggatggattgtttgaaaatactgaagaacatgtttttcactctcttccaaagcttttttcctttaagaaacatattggcaatatctttctcctagaatacaattttgatacatctagaaattacagtaagtggcaaaaacactgaaaaagaggcatagaaaattaatgactatgaatttaaatttgttgaaccaaaacttaacaaatattaatagttttatatattttaaggactagggagtaaggtgatttaatgtggaatttaaggtggaagataatctcttgattgaaagggtatgtactttaccgcacaaaatttttgattttctggcaggagaagtcttcttgacctgggaccaggataaggaaatattttgtaaatttggtgctaaggcccaggtcattttacaggtctatggcagaagttgattcattccttgcaaatatttatggagtgtctactatgtgtttgacactgttttaagtgctggagataaagatagatgagcaaaatagacaggaattccaattttgaatcccagttatagtgtagggtattgatgaaaacagtctttttcagtcacccccaagagataccagtagtggggtgtagtgggcttatttaggggatgaagtcctctggcttcacttgcttttctaaacagtagaccaagactaagcagaaaagcattggcagagcctgaaataatctgcagttatgtcacatgccttcataaatgtggcagtgggttattcacaaaagcacaggcagctcaaatgagtcaactgagaacagtgtccttgcttttaaaggcagacagctcagagatggttcacatagggcctttattgtcaggctacaaatagacatgggtgctgggtagaaacgtgttgtgaaaacacagatgagtcactgcatggctgttgtctaagcaaactcttctgccagcttctgttcagaaggtcttgcctgtttgaagcatttatgttagagcatatatatacacatatataattagaagcagattattttgggagctatgtagattatttcccatgaaattatgttcaaaatagaacagttgaggctacagtgactctaagtacaatcatacagttataatgctgacatagatgattgcatgaattcactagcttggcgtacacattttgcccattaggctgctctgagagaactctgggacttacagaatgggtattcacaaatttcttgttaaatgtcagcagtaaactttagctacggcttctttgagtaactgaaccactcagccaagagttgacattacattcatctgagatgcaaccctggcttgtgactgtttcctttttttatggtacagcaatggaggactagaacataagctttccgaagtctgagaattatgtgacattcttattttccttttcttatagtaagttccacattaatactctggtctccttgccatattgtcaggtaaacaaaggcttttcatccttaccatcctaaataacgtgtccccttcataactaaactctctgtaaccatgcatgccaactcactacattattgcagtcattcctcgatatcagcagaggattggttccaggaccccctttcctcccatggataccaaaattcatcgatgtgcaaatctcttttacaaaatggagtactatttatgtagtacctttgcacatccatatactttaaattatctctaggttacttataatgcctaatacaatgcaaatactatgaaatacgttatactatattttaaattttgtattagcatttattgttatattgttatgttttatttttattttttcctatttttgatctgcagttggttgaatccactgatgtggaacccattcatatggatgggccaattcatttatattcttggttgccaaacaagtatactgcttaattcatgtagctacttctaattaaattgttaaatgtcagcatataaatatatttcagtagaatttattactactattggttgttcattcaaagtactgtctgaatggaacctatgcaaattaaatcaacacatatttatggattacttagtctatgggcaagatacttatataaggaataatttttgataccttgtgaaaagtcttatattatttaaaaaattgttccttttagtgttatgagatacagaaaagtattttaatttaaatctacattgttgattgtgaatgaataagcacagtctagagtgaagactgagtgaagaaagtaattttaatttttttccaggagtaaatataatcctattttcacaaaccttttagcaaaagaatacagtaagatttttagattctgtgaattttgtgatatttatggagcttaacagagcacattttaagggaacttgtctcataataaggaacatttatagttgccatctccaaatttgagactttattttaacataaagctgtgctgagaatatttaatcaatctgcttaagttggaactatatcatttcttatttacatgtgatgttccttgataagatagacaaatctttacaaagcctattatgtgtaatttataacagcaagattaaagcaaattggtaattgctttactatattgagaattgtacaagaatttcaatttagctgagtgttgtactttggcaccaaaatgcatttcctccttgaagtgaaaatataaggtgacgttaatctacactatcaacatattccagtttcaaagttaggtagagattgtctgttggaatgacacaattttggtaggtaaaaataaatagacatatttagtgacaaaataaggattctgcattacctggttgcctttaaaacttattagctatttcttctttaaagaagctttaaataatgtgctttgcttcatgggcaagttgtgaattaaatcctgtttgattgaggttaagtaatgtgtatttggtgggtttttttatttgaaagacctttgtcaccctatttccttgatgatcagaaaatgatagtgatttaggcagggatgtggggagtctcaactgatgctaaattctaattcttattttgtgtttgacttgcaactgttttgagaataagatataattatgtattgtagaaaattccaaaaatccaaaaaaattacgtagaaggtaattttgcccttaaacccatcaaccagaattgatcattattaacattgtcatgaacactttcccatacatcttaaaattcatgtgtatacagatagattgacataaaggatgctgttacataactttagtatttcatggatgtctttccacttcagtatgaatatttaacatcatttttaatgaccacatatatttatgcacatgatgcatgtgctattactataacagagcccctcttagtggacttttagtttttcccagttttttataaacaaaaaaatgtaggtgattaactacatgtttattatctgtgattaccttcctagggcaaatttctagcagaatgatagcaggatgtgctcattttattttttgatatttgtttcaaatacactacacaaggctataccagttcatatgtctaccaataacggacaaggatgtccacttgcttatacccttgtaaaaacagaattttgtcccatattctcattttttgtcgttctgtgggttgaaaaataatggttcatttttgtttaattctaatttctttgattacttagtgagggtgaatctccttttacatttttattgattgtctatacttctttatacttgtatcattggtatattttccttttggggcattagggtttttttcattgccttatgagaactctttgtataataaggatattttctctttgcttgtgagaaatattacaaaacatatttttcttagggttaccatatgtcttttaaccttatttatgatttcttttgctgtatagatcttaatttttgtgtagccaaaatcgtcaattttttaatagtttcttcttttcatgatatatttagagaggttttccctaccccaagataaaggaaatatttacccacatattttagttcttttctgttttcgtttaaattttttatccatctggaattggtttttgtgtaaggttatactggcctaatgtttccgatgatccagatacgtattcacagctcttcaaacaaaaaaaatattagaaagccctccatgtcttgctcatccagcctattagacttggaactcttggtaagatttttggctcaaacttttcttcaagcagggagataattcgtctttcaagtcttgcctctttttcatttcctgctgggcattgtaaacagaaatccttgcttatgacgacaaagtactttaggcagagcgggtggcaataaggatttggcagctgtgatctgtcaggacagaaatcactgatttattggctgtagctacacaggggaaataaaaaaatgagggttgtatatccagtctccttccccaatgtagatgaatggtctgtgtgaccaatcgttactgatattctgaaggagaaggggaggtacatctcacatttggggcacatgggaatcacttgggggacttaaaaacatactgaatccctaggcattgtcttcattggttctgatttaattgtttagggtggaaataaagaatcagtattttttttattaaaaaatcttctgagatgactctcatgtgacccaaatttgctttagatacttgaatcatttctccacttatttttgatcgtgtggtttgtcttatgctggtgacctgacatcaaaattcatataggttaattctgctctgactgcttatttccagtgacattgggctacctcataattcttgactaaactttagtttcaaaggcttatctagcaaaatttaattttattatttattattcaatatgctgcagagttccttatgaacaccaccaaaaagactggtgtttctttttgctgttataaacaaacaaaattctaaagcctgaaacacgacagtaatgttggtaaatgctttatcatttgatgccacctttatcttccatactttagtgggtggaaaattgtcaaaaaaaatagaaaattttttgttttcctaggctgttctgtcacttttctccttagccttttttccccttctgttattgtcactcagcctccctaaacaggtttataattattaatccaaataataaagtccttaataaaaaggacataaaacaacaaaagtcactttttagtgttatacgaagaaaccaaattgcgataaatccaagttgacagcatagatttttaatatttgatgtttcatcatcttgaatgtgcttgcgttgccttagccatgacaggtattggtggccttggcagcccttgccccaagttgctgaaagacataaaatgctgatattacaaattgtggttggcttttaattttttttagaatcttgctcctatggtctgatttcttttagtaaaaaatatgttttactattctgggacttgtcctaatttcttgactttaaaaaaacatgggccaaacacgggccatccttggtttaattgtataccctaatacaagctgaaaaatattcacaaatgtttttggatatcgattttgacttcactgctgtaaagtaaagcaagctattttgtttattatcattgacttgcacgtgatgcaaaggaatggaaagaagcgtctcttaatggccgtagtgttgccgcctaagacttttctgttgatttaaaatttactctgggaaatactgtagacctaaagaggcttttttttacctgtttcttctgaagactaatttttatcttttcacatcatttcttttgaatttctttttctctccttcgtctcttaaaggaaagagaaataatagagagaggctgaaaagaaggtggtgaaaagcagccaaggaaaagaaatcaacattagattgtatctctgctttatatgagactctgttcttagctctttacatattattctttcattttatccaaataattatcccgtgaagtagctattgattttacagaagagaagtaggatttagaaaggttacccagttggtcactggtagaactgagatttaaattcagatgtccctgactccaagacatgctctttgtgctgagccacctggaagagaccttagagattatccagtccaacctcctcatctttttttttttttttttttttttgaaactgtcgcctaggctggagtggagtggcgtgatctcagctcactgaaacctctgcctcctgggttcaagcaattctcctgcctcagcctcctgagtagctgggactacaggtgtgcaccaccatgcctggctaatttttgtgtttttagtagagacagagtttctccatgttggccaggctggtctcgaactcctcacctcaggtgatctgtccacctgagcctcccaaagtgctgggattacaggcgtgagccgctatgcccggctgtcatctaatatttaaataagtacagtacacatatggttgccatgtattgaaaaggtttttatcagtcagagactatgctaagcaccttacatacattatctatctaatgtgcatactaactccaggaagcataggtaggttaaataacttgcttaaagtcattgatccaggaaataatatggtatagatgtctatctgggattgtctaactccagagtccggtgctccactacagtgtctcaatttttcctctccataaaaatactgaaatttactgaggtgaagtgacatttctaagaccatcagctctctttggcagaacggagcccagactccagatttctgactgccagttgtttgctctttctactgttccacagtggtgtcacatcagaagtggaataaaatgaaagcccaaccaaaatggactagagcactttgtggcatcctattgctccacacctcagagcttagctgtctgcagcctcataaattgctagggaatatgttcctctgagaaatcaggtgtagaaatgcctttatgagttatggcttttaaaaatacacatatccacacattgttttcctttttgtatgagtgaacactgaatataataaatcagaaaagaggtttctgatagttcaccttataaattgctttaaactttacagttaaactacagttattcattacatgttattttttaaatttctgtattgtgaagaggaagatgtcaaatagttcttttctcagaaatactggaaacatctctaagtttaagcaagtttccagtgcagtgtgtataataaatcacctgtctgtgtttcaagattgtcagcaacagaatgaaaactgtagcacttaccaaaggatcaagtactgaaataaaaatatgccttttaacagtcatatggcttccataaatcaaagtggttttctggaagaaattggttgttatctttaccgaatgagcaacaatgcctgttgacctttgataagtggaacctagagtgtcatttgggtcttgcttcttggttcctttaacatttgctgagtgtctacagaccacatgtagagatggtggatagcatgatgagagaaagagaaacatggatgatgccagaagaccctgttcttatcctccccaagattaatagctatgtcaaatcaagtagagaatgcaaaaatctcttcttttgtattgctcttttcccctttatattctcccttacactcagtcagtgctgttttgatccatagtagtgataagaaatatcactctttgcttaataaagaatgttgtagtatatctgcctatcacatgcacccagagtgtagcttgtcctgccacaggaagcattcaagcttctacctttcatcttatgcatacactggtgtaagttgtaaaaaagaaagataaattataaagacatagaaagcccactgtctatgcacaagggttgaaatcctagtctgtggtacaccttttatccttaccaggggtgaagtctggttgggcaagtacatacactaaagacccaaagacttgttgtgtcacattgaatgtgaatttgttcatatcacttaactcccttgaatctcaatgtctaaatgtttcagaaatcaaggcaaatgctatttgttggcctaggataacctttttctgtcttctctgcataaatacatcttggttctgctgcccttccttgttattctggtttctgtccctgtgaggaagaatgagcaagatagtctctctacggaatggctataaataatgagatggtacccttcagccatgtgctggacctacatccatgtaaatggaagtccttatgagaccttcctgccaggcttcaaacctagatttgtgtatgaactggagttgttctggattgtttcagagtgtgtgtatttgccatgagagaagccaatcttactatttaattgtcaagtcttgttttttatccaccgtcatcccaactacattattatctagtgctgctctaaaggatttttgtttgttttctgaattgaattccacccttaaaataggaggatgtgctattgctaatgtcaatctatggagaatgttgctgtctctgaagtagtgttgtaagaaatattttgagtaattattgtaataatggtctcctaagcttttgagtggcacttactgtgtaagttttgtaagttgatttaaaaaacaatttcttcataatcattttatgtatattgtattttctttaaaaatgataagtgaatgagaagttgctggagaacttttgggacagtggtaagaggtggcctagtgaggctgacagatggataggttaactcggaggttgagggtcacaggaaatgactgagggacactgcagattccccagaaatccactctgctccagtcaaggggtcatttcaattaaaaggcttattttatgtggcataaatcatacttctaacaacatgtaatttattgtttaattgaagagagaactcttcctataccaagagatcacatgattttgctccactgttttatctaccactgcatatattattgtgtcctttaaagctatagaatttctttactcatttgaaaatgttttattttaaaagttttaatgttcagatttatagcttcatgtatgaataaagggtttctgtcatctttttatgtttaaaaatcatgtcttcataaaatattattttatgtctacaaaagaaccttcctacaaatacacatgtgcttgtctataggttggtgcaaaagtaatcgcggtttttgccattaccctaattattttaatggcaaaaaccacgataacttttgcaccaacctaactactaactaaactaataactaaagtttgaaataatgaaaaaataggaaacagcctagtttgtcatccttgaaagcattggtcctgagtgacgtgattaggaaagttaggatcgttttgtaagtcagtgatcctcgttgacacgtcacctttgtttttattattctaaaggaaaatgatgggttgatttccagagatgtaactaaaaggaaatgtggccataaaagactacttatttatgttccagcacatatattttctctagaaatagttaattgaagctcttctataagtttacattggacaatgaaaatgtaatgagaatgtcttttgaaattggtgtcttagaaattgcagaatggaggacaaatcacttttttggtcccctttgtgcccctctctatttcaaaggtgtttctctaggaaaaaaatagcttttgtacataaaagagagctactgataagtgcctactatgtgcaaggcgaaatcaggctaaacactgaaaggaaccacaaagaggaaattgccaccaaaagtaccaagtcacttctaaccatttgattctgacgtgtagaagcttcagttagtattttagtaaggatcggagccaccttttgccttctacacaccagccatcatagtaattatagtgctttagagcaggtcgacccttggagtagggaaccatgactaaattgtaggtgaaataaatgtgaaataagtggtggcaatatgcatatgggtaaaagactttgttcttcattcttgatatgtttgctaagaccctcctaatagtatattcacgtggctttatttgcctagtgacatcacaaatgagaagaaaaaagatgtgtttcatttaacatctatattttctttattttagggcgtgttggagagtttcctgggcactgctgtctctggagccatcttttgcctttttgctggtcaaccactcactattctgagcagcaccggacctgtcctagtttttgagaggcttctatttaatttcagcaagtatgtacatacatatttaattgcaaattagaattgcttaattgtagaacctttataggctagatagagcatagaatagtgattaggcagatccaagaatcactcagaatactggaatgttcagatgtgagaggtgaaagggccttagcaattaggtagtcaccacttgtttcagatgtgattcgactgaggctcttatgttgtgtgtatccttgctcccttcccacttactctctttcccattgtcctgccctgtgctctaggggctgatgcctgtggacagcaacacccatgcccctttgccttctggcttcctcttgggtttggctaatggggagtaccaacaagacgggaagagagagagagagagagagagagagagagagagggagagagagagaggtctgagtatgtctgcctttccccagctcaccgtctttgttttagcacagcattctggcagtgcttatccccgaggactttagcccctgtcaagtggctcatccaccttgactctagccctcaccaggctctggtagctctattccttccttggccttttcaagcctgaagttagtagtggcttcctgctgttgatggtccctgagtgccttgccatttgttattacttcagaatgccttctatttcctgccataatcctgactgacatgctagagaaattaaattgattaagttcacatcattcaataatgaaagagactggatgctctttacttagtccactgctcctcaccccagtttcatgttcttaactaaagatagcttccaaaactcagctgaataaatacctaacatttattgagagttgatcatgtaccaagtattatcctaggcactttacatgtactaactcatttaattcttacagcaatcctgtgaggtagggaccacatcctgatttatagatgaaataacaagcacaggaacaataagtaaattgcctaatattatatcacaagtcatcggtggggctgggatatgaattcctgctttctgactccagagtccaagtctcttcaggaatcactagaagtttctaatggacattgcaattatgatatcagcattttcttttagaaatttatggatcattttaagaaggggaaacgtgagtttccccaagtggccacattaatacacaaatagattcaaaatcaaattgggtattccagcctctttctaatgtagttgatacctctaagagagaattgcctttactggcagatctcaatccttaggtagattgaagaatgtctcatggcctgctggcactccttgttggcattcccatagtcatattgttatacatttttaggattttaattttagaactgtcattaccttcatagtacatcatggacttatggactcatatatagcctttgaaagtatgtgtgttatcaaaaatagtcataagatggaggagggaatgaggatttaaaaccagctttttgaaaacagggttgaggatatcagcaggagtcttttgagaatgtaaaaagttccaaattttaagtagtgttgtgaattttctgtaggtaattattattataaatcccttctctatcataattctcagaagaacattggaaagaattttattcatgttagtttatagaaagagtcaaacagtttttatatgtttaaggaaacattgtgtgagacaagaaagcctttgtggaaagattaaacaaggatgtactataaacaggaacaaacatgcacaaactttgcagaaagatttattggatgaaatgtgatcagagccttaatctacagaaaatgtttgcatcccagtttgttttaagtaattgtgagatacagattatttcctttcactaagcaagttcctttctcgttctcccttttttttctatcataattggtaacataacatagttccaagtgatttatttgaaaacagttgtacatcaacaagaaacatttgagaagccatgctttaaatccatcacttagtaatatgtggcaagcgttattttaatctcaatgctatatcatttgtttatgttatagcagcagcagtgataatcttctgtctagatacaaaatatttgggtagatcactatttccaaaagtgtgtttcatcaattactagactcattccatgctccatgaaaaaaaaaaacctctgtggtcccagtaagtctgggaagtgctgtatactatatacccccctcttggtagttcactttagactttagcatgcaagtgatctgaaaaagtccttcagttaagaactattttactttgtcttgcccagattttccccaacatattttaccactgttgaagaataggtagatccttgctttgtaggttcactggactcaaactctgcataatcatggatttatttctgaggttttgatatttgccctgtaaactggagaattataaaggaatatgaatgatatgctgccatctcttaaaatcagtaatagaaggaagaaaatagctcacaacttttcaaagatacttgtagttttatttcccaaattctgcaatctgttttgcattatttttacacattttatcacaataataattagattccttctttttacttgggtgaggaatctgaaagatgtttcagcaatgtgttctaaggtatataaaaacttcacaattaaggttggattttaacttgtattattatcatttggtcattcagtatttttccctatattctttaaacagtttacttttaagccttcaaatttttaattcgtccatgatattaccggatgtatttttttagggagtttatatttatttgtcagtggctgcacattaatttctgtagcatatttcagatgtgacttcttcagtttgtcttgtatccttggttttatgctactgagaaactatgactcaaaaaatctaggaacactgagtggtaccataatgatatgaatctattttttccttttaattcaccataatttcttctttgatctctaatatcatttcctgttgctttttaaaacttaattgctgtttaaatttggcaccaagggaatttattggatgtaataataccattttactgtaatcattactgatgatcaacttatttacatttttctcatcccttattcctctttcttcttgatgctctacacatatcactttcataatgaagtgccattggttttattgactttatttgggtcattcttgttgaactactgtagtattgcttaagtcttttaaagcagctagtttagcatattgtttagattctaaggtttaagtttatacatgtatcttttcctttgtacccaaactaatgttgttcctaaccattagctagttaatggatttgtttctcatcctatcctgtaaacattaaatctataaacaactactagcattcttagaacaaatcaagattgctctttcatcttcttgctagggtagcaaaactaggtaattgtttaaaatttttattttaatttaaggaaaaagtatgttgtctcagaagtaacagaactgtatttcttagttgttattctgacactgactcattgtatgataatgtaaattatatcaaatttctagaactcagttttttctatagtttacttatctcacataggcatgcataggatgaaaacagtggtgttccggacacaaagcaaactgcaaaggaaagtaaaagttatcttcagaaggatcccataaagtctattgaagataactttaccccagtattaataatctccttcttcggtaatgtatttcaatttgcatgattagataagaagagaaaaacaaaagacattgactttaatattcaccctctctagagctaaatacaaatcagatggggaatcatgctacaatttttaaaaggaaaatctaagaatcaagagatttggtttctggtcaagctctgtcaggaaaggccttaaaactctgatgttggataaatgatttaacttccattggtcttggtgtctttatctataaaatgagttgtaatttgacagattggtgtctgtattagccagtgttctccagagaaacagaacccataaaatgtgagtgtgtgtgcagatttattataaagagttggctcatgcaattatagaggctgacaaggctgacaggctggagacccaggggagccaatgctcctatttgagtctgaaggctgtctgctgtagaaccaggaagagctgatgttgtggaagttcaaaggcagtctgctggagaattctctgctgccctggggaaggtcaatcttttttgttttattcaggcttgcaactgattggatgagttcctcccacatactatggagggtgatctgctttactcaaagcccaccaatttgaatgtttatttctcaaaagacaccctaacagaaacacccagaataatgtttgaccaaatgtctgggtgcttcgtagcctggtcaggacataaaattaatcatcacagtacctaaagaactttaaattctaatattctataattttgagctatcataggaacagtcatgtcttggttgcatgagacatagttcataggtcagtgtcagtaactgtctcagccaagtcttaagttacagacatgcatttattcatcctgcaagtctttattgggcactttctatgtgccaggcactgtgctaggtaaagaatttgaattttattctaagggcaatgggaagctattgaaagatttaagctagggtgtctgactttcattaaaagggataattttggctgtggtgtggaaaatggctttgagtgaggcgagtatagatatcagtaaggatatcaatgagggggtttgtatcaggcaaaaacttacctgtgggttgggtaagattgggttggtgctggtagaggtggagagttgactgcctatgggaaagttttaagatatatcattagcagttatcagaaactcattgtctaaaagcaaggttctagagtgtcaagcatgcacaatccttgacttatttcttattctcatgcaagtaatacctactacccgctttttcgtcacaaataaatagagtttaaaaaatcattgtaaagcactctccacataattttaaagggatcagtataaaatggtaagacattaacacttgacccatcctttcagagttgtgaatcttgaactattaatcaatcagttgtaagaaatgggaaaggcctcaaaagacagtgatctccttagatagaagtagcctattctaagtctgctgtgggacaaacacagaaagatgttggtcgcaagatgcttcacacccagcttcagcagaagaatatcagatctgtgagcaagcttcataagaagtggaagggtctggcagtagcatggcaagacagcctttcttgatctgatgacagatcatatttctaattccacctcatgttggtggcacactgtccacacacagtgagcattacaggccatcttgtgccacgttatctttttaactattttttcctcttcctggccttgctctctctggtctgtccagaaagtttctactacttatccttgaacaccttgaattttttctgcgacttcatctttccttccagccagaattagttactccttcttctgtaacattatcacttagtattttatagtgcgattacatttatcgatttgtttccctcagtagaccgtgatgacatagggacagaaaatatattgatcttcatgtctttatgaacccataaaactcatacaaacgtttattgaacacattctaggtaccagtgctatgcttgcaaattgtttactctataaactctatgaaggtagggaccatattttttgaatgagaaaaataataaggttttcacatataaatgatataactactttcaatgcattttcctcaaacttttattgctattttaaaaattgtatcattaaactaaattcttaaacttagtgctttctggctaaagtagagtttcacatttagtggctaaaggtgatcttgtatttttgtcaatctttctgtagacatttggtagttttatattattctttgtgttccaaggaggaggaatctaaacatttttctttcttttttccagggacaataattttgactatttggagtttcgcctttggattggcctgtggtccgccttcctatgtctcattttggtagccactgatgccagcttcttggttcaatacttcacacgtttcacggaggagggcttttcctctctgattagcttcatctttatctatgatgctttcaagaagatgatcaagcttgcagattactaccccatcaactccaacttcaaagtgggctacaacactctcttttcctgtacctgtgtgccacctgacccaggtgagggcattacgctttgtgtttatgctcgctttgtatttggaggaaggtgtaggctccatgcttgcaaattttcaacatgctgtcatggtcctcaggaattagtcttgtttttttctctgaaaaactctgctactgaatttgatgtctcattgcctgaggtattttagctgtatgattcaaccaggaaggagaccaggagctctggaatgtgaacataaccaactcaatattttgaaattaactcaaactgtgggatttgcaaggaattcatgtgtacattattcttgattttataagtggggaaacctggatacatgtattaacagatataaatatgtgacaaacctatcctttgctgcttctttattggtgtaggaatgtcttcctttaagtaaacctttaatacatgattttaaacttatagaagaaaaagatactaatccacttcagataatttaaagaattaaattatgaaaaaaagaaattcagattggaattgcctactggtagaattttatagtttatctctactagacaaataagaaaagaaaggaagagagaagaagaaatgaaagaaggaatgtgatgttctaggagtagatttatattgtagaatccagaaggacataacagcaaaagtaactcctggaaaggaatgtgattctctatatcttagccctttaaaatctatcataccaaacatgagttgacatcagaactttttcacaaaaaaataaaaataaaaaaatgttcagcttggtctttggaattctttcttggagtaattccattataaaattccattttataatatgaaaggcatttcaaaaaaggatttactttgagggaaattgttttagatcttctctcatagaaaaaggaatagggactgggtgtggtgtctcatgcctgtaattttgaaattaactcaaattgcagtatttgcaaggaattaaagtctgtattattctttgtacagcactttgagaggctgaggcaggtggattgcttgagcccaggagtttgagaccagtccgggcaacattatgaaaccctgtgtctacaaaaaatagaaaaaccagccgggtgtggtggcacgtacctgtagctactcaagtggctgagggagtagcaagaccctgtcaaaaaaaaaaaaaaaaagagaaagggataggcatttgtgtcagacaattacatgttagtagcactagtgattctaggttacgcaattagatacaggtctatgtcccttaaaataaaaattgatatacagtccatactttttactaaggtcttttagcaccagaagtacagcagtgttcaaagggctgggacacaaatgtggggcacattcatgcaatatccactgcgacttacagattctgaggaaaaagctcttaatgtttaccgtaaaacaaacatggttatagactagaatgcagaatgcttatgaatttaaaaaataagcaagatactactttttatgcttgtggcatgctgtttcagattgctcctagatattttggtatgcaatgcattcttctctgctacgttggtgaagaagtcttagaagactgatatgtgtcttgaattgagaaaaaagagaacactacttccctcacaataggcagtcagtaacactgatgacaagctagggcattgttgggctgtgtgctcatggattctttttgtgttaagataaattagcacacattaaaataaaacccatatttaaaagcaatgcagaaagttatataaagtagaaatttaaagattcaaactaataagaatgccatatagttatgaaagctaactagcgttcagctgtatactgatttgaaatatttgataatttaaaaagtacttggaaacaagcacaatatgtgtcattcaacccatgatatatattattattagaatcaattaaatgtgctccccagagaaacacagatgttattgtcactcaactatatggagctcttcctaggaaagaagggggataaaactcccccttcagtcagtgcttcagggaagtccagctgttcaaaatattggcttcacaaacatttaattgtgagattttcagccttcctttacatttattaatttatacataaatatatgtgtaagtttatttatttacgacttcttaggcaggtttgagtaatcatacaccaagattttctaaaggaaaaaaaacactttgagatattcatgaagccagatgtgggctttgtcaacacacctgtcacacagaaaaaaacatctaatgtcaaccccatacctacctgaggcgaatggaaacttgtgttcgttgttttataatttggatgttggcagagaaggtaacatgaaaccaaggaagacatatctaaatgtgttcaaattataaaaagtactatggttttacatgtaattttccttctaagaaggatctttgttttttttgaaaaagtgacgttaagggtggaatctattttacacttgcatagcaagtgctgacataagtggtgatagcttttcctttgtccagtttttcccaggctgtgtaaaaagtcagtgctaagtaactaggaagttgtccagaaggactctgacaattcctgctacctctagttggtaccaataaagtactgtcacaggactttgaagtcagaagatcctgtattcaagtcctggtttggctcaggccaaatgtgtgactttcagcaagttccttttcccaaggtatattagccccatcttcctaacctgtaaactaaggttaataatagtacctaccttatagatttattttgaaggaaaagaaagagctattacagataaaattcttaggacagtttctaatatgtaataagtaatcaactgttagctgccattattattgctattactgatccttaaaatttagggttagtatttagccttgaagtgtaagtaatagaataaacagacctatcttcatcatccttccttctaggcatacattgtagggcagttggcccattatgcaacaagactgttggttgtacctcttattggtactcatgaaagatatatatgtgaacatgaagaattttttaagtctatggagatgaaatctatttgtggtttggaaaaaggcagtggatagttatttgcactttcatgacaatttcatatttaacaaaaccccataagattaatgattgtgtatctcccccataaccttagtactttttgacaatgttaatacttctccataaccttactgctttttggtagcaaactgaatacattcatcatcaatttagtatttcttgatatcaaactgaaagatgatagtgagagagtaatacagttgcatatagagctcaagtaaatattctaaaaataacaaaagactggcctttcatcacaacgtgcactcttagtaaaataattcaatgagtcaataatagttaaactggcgtatgacttgtttttcaacactgggacagtatgtaacagtgaaccagcaattgcacagatggagtcgtgatcctgcaaactgagaaatgattttacaggaatggaaataggggccactaattactaaagaaacctctcttcatggccacaatatattgtggcttttttatatgtgtgtgctttgtcaaggcaacacttccttttctctttttttctttcgtcttctcacttgcttccaaaaagcctaatcatttcctaatttttcttttctaaatgcacttttttctccattcattttgctcccaactactgcttggtaacccaagtcacatacataggtttactgagcaactaaggaagcttagttgcaagtgctagtaggaaaatcagtcagaaagtttgacatatgtgagtggatacatgccatacatgggtggtttttgtgctaagatttgcttttcttagaaatgggatagctattaattagtagacgaaatggatgttaaatttcccactgtactttgatgattacatagcagagtgtgtaagaaaaacgataatttagttcaaaagccaaaagtgaaaactgaaaaatatccaattgaagaataatacacaatatctaatttcatcaccaacaccccaatttagaaatgttaatgtgataaagtgtaaatactatgtgctttagagtaaacaaaactgagtttgaatttcagtgttacccagaactaggctaattacttaatctctttgtttgataaactctgaactgggttagtgattgtgcctattcttagaggttactataaaggttaaatgagatagtatatgcaaaatagtttggcacctaatggacactgagtaaaaatttgttctttttcatatttctcactatcctacaaaagatgccccagtgagtttaatcttataatagttgtattctttaaagatttcaaacatttaattttcccataaattttcctagggaaagatactaacaaggcttctactgcaagtctgccttctcccccaaaattaacaaccagtgtgctgttatagataaatatgaaacattgaagctgtatttacaaaaaaaagttaaagcttcattgcattgtagttagagtatttaatactattgcattgaatctcgaggctacaaaagtgttgtatattatacatagtcattaagaaaaaggctttaaagtctaggggcgaggtgttcaattcttctaagaggaatctctttaatttattcaaaagcataaatactagaattttggaaatagggaaaagaacatgggcatccccccaactttcacttgttttctcttctgtcctctgtccttttttacttctcattcattcatcaacaaaaattttctgagggcctgtttcactgctttttaagaattgtgcagaaaatttttgcaatctgtccatctgacagaaggctaatatccagaatctacaaaaaatttaaacaaatttacaagaaaaaaacaaacaatcccatcaaaaagtaggcaaaggatatgaacagacacttcttgaaagaaatttatgctgccaacaaacatgaaaaaaagttcattattgctggtcattggggaaatgcaaatcaaaaccacaatgagataccatttcaggccagttagaatggagatcattaaaaagtcaggaaatagatgctggagaggatgtggagaaataggaatgttttcacactgttggtgggagtgtaaattagttcaaccattgtggaagacagtgtggtgattcctcaaggatctaaaactagaaataccatttgacccagcaatcccgtgactgggtatatacccaaaggattataaatcgttctgtaaggacacatgcataagtgtctttattgcagcaatattcacaatagcaaagacttggaaccaacccaaatgcccatcaatgatagactgggtaaataaaatgtggcacatatgtaccatggaatactatgcagccataaaaaatgatgagttcatgtcctttgcagggacatggatgaagctggaaaccatcattctcagcaaactaacataggaacagaaaaccaaataccacacgttctctctcataagtgggaatttaacaatgagaacatatgggcacagggaggggaacatcacacaccggggtctgttagggggttgggggcaaggggagggagagcattaggagaaatacctaatgatgggttgatgggtacagcaaaccaccatggcacatgtatacctgtgtaaaaaacctgcacattctgcacatgtatcccagaatttaaagtataatgataataaaaagaattgtgctacttgcagtgaagtagaatacacacatatacaaacacatattataaaatgtattgttttttaaaatagtgttaattgctttttgaatgaacaaaagtgagagtttcatttaatccaaactttggaaataaatttctaatctaatacctctgttcatttgcctaatgtgtaaatcttgcagtgactatatactcaaggcacattaatattttgaaaagggtcaaagaaaattttctgaccaggtgtcagttttacatcctgagggaaaagaaactttgctaaaaataatgaactataaaagtaagaaaaatagcctcaaagggatagacactatattgttaacaaaagggatatattttattgatttattgttgactgttccaggagaacatgcttaacaatatatgtgtaagtaaggtgagtaaattctttctcaggaaccaagtgcatccctgtctatattatcttcaagtaatagttggcttttttcctggtataaaactgtaagaccaagcctggtctggaagtaaccatggcttccagttccatacctttaagtcattcacagcataaggaggcttctagatgctctaaaatagttgtcactggagtttcaacatcatttctttctacataatttttctaatatattaataagcgctgtgcaacaatatgttatagccattcaaaagaactgctggattgcatcccctgtgttcccatattatagtcaatatgtgttttttaattagaaagcccattaaaagaaaataagaaaataaaagatcatcctaacttacctcccatgaactatatcataatatatgcaattttatttttattgtgtgccattccctctttatgaggtaggtttaaatcataaactaatggtaaaacaaggaagtataagttcttctgctgtagcatccctcaggcttgcatttgtgagactcctttaccggcacagttgacattttatcatttatggtaatagtgttttggaagagacccatcattttagtttgcttttactgtcttaacctatgttttagcagtttctgcataatgcttgccggaatcagaaaatgggattgtcatcagacctggaaaattctctagttttgggttgtgtaaaagcagatttgtaaaagtttccccatggtaatgtctataacacatctccaagatgtaatgatgggtgggtatgaaagagaagtttttgtgaaattggggacaaaatatgcccatctttttttttttttttttttgaggtggggtcttactctttcacccaaactggaatgcagtggcatgatcatagctcagtgcaacttcaaactactgggctcaagtgatcctcccacctcagcctcctgagtagctaggactacaggcacatgctaccatgcccagcttaaatatattcatctcaatatctccacagtagctcagctctttaacttccagcacaccatcgtagatgaacttgtgaagagtgcctgtagattaaagagtatacaacttgaacttgcctagttgtggtgaaaatctcaatcattaagtcttgctgaaaatacttgggaaaactaaaaggataataagaaaaaaaaaaaagaaaaacttactactgattttgtctgttttaatacttaaggctgagatagtagcaaataatttccctagaagctacttctctcagttttcctttgtcttccctcaaaagccatttttaccctttgttgcctttattgacctagaaattaaaagcatacatatttaacttaatcaaaaggtactagtgtgctcaagttatccagaacccttaaataaatctgacatgaccatgtggcagagcttatttaattttatcctttatctattttctagttacttaattgccttaagatgtttcttaaatgtaatggaataaaactttaaagtttcattatcatggaaaatagtcttaaagtttttcttgttcacatcgggttaatcagtgccacatagctgtaaccctaagaagccatgttgagggcacaggttcagattaggctaatatttattaagcaccatccaaatgccagacattttactaggggattttaatcaactatatcttgataacattgtatatttaaccatcacataaatcttgagagatagctgacattcatcccagggacaaggtctgctttctccaggtcacagagctaggagtaatcttagctgccatttatttagatctatcctgtgtttacaattttgcctacactgtgttattttatctgcacagtaaccttatgaggtagatggtttcaaatccagttttacaaatgaggaacatgtggtcaagaggtgtgaagtaactcctcaagattatgtggtgtgggagcctaagggcactatgctcagaaggtgctgggtccagaattcaagcccagtttttctagtacccccttctccacattgtattaggtgatacataaaagcagacagatatgaccttagtgaccagttgttgcttacacttgacctcacagtctcacgtgagtttgtagctgttcctgatggtacagttcctgctaatatgtaaagcagaggagccatggggtagttcctggggccaggtcactagaagataaaggggaagaacctttaacagtgcaacagatactcccctatgcaagaggtgtgccaacactgacacatggatgtcacctccttttttctctcacagctcccacaactgcagccatacttgatccacttgttctttctctaaatctctcattaaacatgaagaagtcagcttaaatgcctagtgttccattattggaatgctaagcttgtgggagttatttatatcctactgctcaaggtcatcgccaaggtctgatttttcacacacaaaaaatttttggaataaataggctaagaaggaaaagtcacagatacatttgtaaatgtcaattacttacaatattcattccctcattccagaaaatcagctaaaatctgatacatgggaaggaggaaagagatatgaaaatccaagtatggaaaacgatcaacctgtggaagctctctgaaagccagtatgaaacagagattgtcccagtggtaattggctacatctaagttagccagattcctagggcaaagggtttctttgcctcatgagccaggatgctgagtaaatgggagagacagtgtagagtgttttggcttttccatttgacttttccagaatcctaattaaggagattgcagattccatataaatggatcattctgcaattggttgccaaaatatttgcacctggatccaaatggtaaccaacggttcttgtagaccaagcttccaattgggattgatcattttcttttctgtgagcctaaagaaatttacttttaatcttgtttatggactctaacataccctgccaatatgcaattatgaaactgctttttaaatgtatttattttcaagtctttcttctgaagcagatacttattaaaataagtatggaaagtgttatatactttttactgtccttttgatgctggtcttttgggattttgagagccaatgtgctttaatagcttgtcttaggggaaaaaaattgaaattctaaaaggaatttaaatgagcagaattgatgcttatccaaaacttgagagcagctactaaaagttcagattgcaatcctattttagtacacccctggcctttattatccatcattcatttcatgaagaaagagccttgaatatctttcctcctcagtctttactccttgtttttatgcagaaaagtgtgttgcaaaaagaccttcaaactctcgtgacaggaagctgataaaattgcattaaagaatctagctcaagaagggaagcttctcaacactatccaaatagtatctgtaatttcatatatgttgcctttcctcaaaagctcagacagatcagacatttcagatcacagttgagagtcacatcatctaacattggcaagtactatctcatcttgaattctgtggccacataagtcatctgattttgatggttagaaatgctgtgtaagacaagaaagaatgctgaacaaggtcttgctaccaactctgcttctgataaactataaccctgggcaagtaactggcatagcaagcttcagagtcccatccaatatgaaatgggtataaaagtatacccattatatgctctaggatgttttaaaatgaagaaatacagtgtaagaaaatgttctttcagctttttagaacaacatagtaatataaacctagattttgttaataattatttactaacatcttcttccttttgagaatggattcattcggctttattgtttagaccaaatgtcctttagcctgtttttgtttttgtaactttcatttaagttcgggatacatgtgcaggtttgttacatagctatatgtgtgccatggggggttgttttaaagattatttcatcacccaagtattaagccaagtacccattagttgtttttcctgatcctcttcctcctcccactctccaccctctaataggccccagagtgtgttgttctcctttatgtgtccatgtgttctcatcatttagctctcattcataagtgagaacatgcaatatttggttttctgttcctgcattcgtttgctaaggataatggcctccagttccatccatatccctgcaaagggcatgatctcgttccttttatggctgcatagtattccatggtgtatatgtaccacctcttctttatccagcctatcattgatgggcagttaagttgattctatgtttttgctgttgtggatagtgctacagtgaacataggtgtacatgtgtctttgaaatagaacaatttgtattccattgggtatatacccagtaatgggatggctgagtcaaatgttatttgtgtctctaggtctttgaggaatcaccacactgttttccacaatggttgaactaatttacactcccaccaacagtgtataagtgttcctttttctctacaacctcaccagcatctgttattttttgacattttagtaatagccattctgactggtgtgaatagtatctcactgtggttttgatttgcatttctctaatgatcattgatgttgagctttttttttcatatgattattggctgcatgtatgtcttcttttgcaaagtgtctgttcatgtccttagcccactttttaatagggctggttttttttcttgtaaatttgcttaagttccttatagatactggatattaggcctttgtcagatgcatagtttgcaaaaatttccttccatacagtaggttgtttgtttactctgttgatagtttattttgctgtgcagaagcgctttagtttaattaaattccatttgtcaatttttgcttttgttgcaattgcttttggcatctttgtcatgaaatcttttcccatggctgtgtcctgaatggtattgcctacgttgtcttctagggtttttatagtcttgggttttgcatttaagtatttaatccatcttgagttaatttttttatgttgcataaggaagaggtccagtttcaattttctgcttatgatcagccagttatcccagtactacttattgaatagggaatcctattgcttctttttgtcaggtttgttgaagatcagatagttgtagatgtgcagtcttatttctggattctctattctgatccataggtctatgtgtcagtttttgtaccagtaccattctgtttttgttactagagccaggtagtatagtttgaagttgggtaacatgatgccttcagccttgttctttttggctatttgggctcttttttgtttcatataaattttaaaatagttttttctacttccacattgagaagaatctcagtggtggttcaataggaataacagtgaatatatgaattactttgggcattatggccattttaacaatattgattcgtcttatccatgagtgtagaatgtttttctattgtttgtgtcatttctgttttctttagcagtggtttgtggttctccttgtagagatctttcaccttcctggttagctgtattccctaggcatttattctttttgtggcaattgtgaatgggagtttgttcctgattgttgttaatatttaggaatgctagtgatttttgcacattggttttgtatcctgggactttgctgaagttatttttcagcttaagaagcttttgggctgagactgtggggttttctagatgcaggatcatgttgtctgcaaacagggatagtttgacttcctctcttcctatttggatgccctttatttctttctcttgcctgattgccctggccattacttccaatactatgttgaataggagtggtgagagagggcatccttgtcttgcacaagttttcaatgcttccaagttttgcccattcaatatgatgttggctgtgggtttgtcatatatgtctcttattattttgaagtatgttccttcaacacctagtttgttgagagttttttttaacatgaatggatgttgaattttatccaaagactttcctgcatctattgagataatctggtatttttttctttagttctgcttatgtgatgaatcacatttattgatttgcatatgttgaaccaaccttgcataccagggataaagcctacttgatcgtggtggattagctttctgatgtgcttcagcctattttaattccctctgtgatctgtaatgaaacagaataagaacacagataataatgcacatgtacttgctttactgctgaaatagagaaactctggcaacagctagctttagtttaacagttttacaatctaaagtcttgaaagaccagagtgaattccaaaattgaccaaaagtagggctcaagctaaatattttatctcttttagttgtttttcttgttttttttcttccccaatttatctgctctcattcatttttagtcatgaaatgccctcttttctaacttcctttattgacagtaaacaaatatttttgagttcctgttaagagctacactgggtagattttagggaaaaacagtgaatgagataagcttcttctgtccctcccttatggatctcatactctaatgtcagctatcaaaacctgtgtgtttcttcttaaaggtttatataggcaggacttgaagcatggcaaactaaaaaggcaagctagtggctcagagggactggagtagggatcaaacagtagctagcaattcagatgttaaataaactatgggaccctaaacaaacaaacaaataattaaaaaccctgatgtgttgttttataatatttctataaattaggaatatgctctaatagtttattttataatacataaagctttgcaaaataggaaaaaggcttatctgataaagaaaaatattttatagaatactttttaaatactgttttttaattttcagacacataaaattttaaaaaaggaatgaaacatttccaagaggaacgttggtttaataaattaggttcttcttcaagtgccatcttcaacctataaatgacgccacattatatgaaaataatttttaaaattagattaaatgttcatctccattatatttttattatttaatactgtctcttgttttcacacattttgcaaagataacctttctcatacactgttgaaatttccaaaagctacaaattatttaagtcttaattagtaaagcttcaatatgggaaattttcctgtacattctgaagccagtggtcaacttaatcaattatgaacagcccttgttccactagcaaaatatattgagtaccttgtagtatcagggaagttttatttcttttttttttgaaacctgaaacaaattttaataccgtctctttaaatattcaccatcatttcttatcagattagagcacagcagatgtgtccaaatctttgttttatctaggtgaaaggtgaacacatttataataaataaaaattcattgtgcccttatgttgttattaaagacatttttactgtataaccctgcttttaaaaatacctaattatgcatttaaggtctttttctattttagttttatagtataaaataattatcttttgcttacagctaatatctcaatatctaatgacaccacactggccccagagtatttgccaactatgtcttctactgacatggtaagtgacttactattttaaattaccttcatactgactgcatattgtatacttgtttataatacttataatatatgatgtcttctaccactcagcaattctggcatgaacacatacgtaacaattattgacagtggagggacgggaaaaaaaaaagccactttcctttgctctagtcagcactttttttttatttgccttaaaaaaagctgaagccaatatttacttctataacatgctttttaaaacttcttagaatttaactgccacattgcattaattgtaacctcgaaatattttcacaagggaaaatgtgagaagttggaaaatgagagcacagtatcctctctctgtttctcgtatggttaagaattcttaccaaccaaatggtgctgtgttctcttcactaagagtgattgtagcaggacctttcccctgtcacttagaacggactgtgcctctgtcacatgatatcctttcccatggctggtaaccaaggatctttaggagactggaactaagctttaaaaatgagctgttttgcatggaaggtcacacactggaaggaggcttttgtattggagaaaaaggggaaagtgctgtttcagacttccaattgtgctccttctatgctgaacatggaatcttaccaaagaatatcaatctttcagttataaagacagaagccataataccttgtgttgatagagtgcccatctctcaggagacccggacatttctacagatattatgtagtgagtgccctaacatccctttcaaagatgatgttttgtatctttcctgggcaactctcacgtgaccctcttttttgtttttatattctgtggctctcttgactgctttttttgctgttaaagtcttctctgacttttctcaaacttacttctctatttcttccatgtttgatgttaggtgtgtgaaaaagtatgtgtatatgttttaccacatgcatacagaaaggagttcaactttcagtctttcaactggtcagcctattgcctaaaaggtcttgcctaaatacaggcaaaactgcctccttctagatttgaaagaattttattcaaaattcttatagtaaaaatataattaataaactataatttaataatatatattttaattaaaatatagctaatatagttaataaaaacataagttaatttgtaataaatattagtgaaacactcacttccactgacttaagaaaagaaattgttatctaacttaattctttttgtaactaatcaagggaatcattaaaattaatgaacttttaagccctgtcgttgggaagtcctggcagaaactccagcaattgatatgtattaaaacaaaatgttacaataaggttcttgaaaaaaaatggaagttctgattgacttctagtgtgactgtgatagagacatagaggcataatgtcatttcaacttagctactatttatagaacacctactagagaccacatgtgttacacatattctcatcattgtagaccttaatatgtactataaccatcaacataaactaccagggttaattacttctattttatacatgagagaaactgaagctccagagggtaaatcacctttcttgctttaggtcacatagccatatattagtagaacaaagatttgaagtgaagtctgggtggttcttagactggtgccattcctcgtataccatgatgcttcaatgtacacaaatggcaatgtttacccttccagttcctatagatgccccatattccagggcagcaatcccttcatatgcatcaattgcataccttaattaaaatgtgaaggtgctatgttcagcacctctagggaaagaagttagaagaaaaaatgtgtgtgtgtgtgtgtgtgtgtgtgtgtgtgtgtgtgtggtcatgaaggccaacttttattttatccttcatttctcctttttcatttatatcattacccgtatttatatgttgtgtatacacacacatacaatataggtaaatgactcagaaatgagttttaaatatgatttattaccatcaatcataatgatcaattattgaggcacctactaggtgccagactcttcacagtaattgtctataattctcacaatcactttatgagttattagatgttacccctattttatagatgaaacagagacttagaaaagttaactgacctcccaaagaccatacatattacaagtacatggtaaaatgaggatttgaactcagggttttctgcctctagaatctgccttatttctgtcctttcaggaagcagcatagtgttttatgtagaggaactcacagatattgagttcttgtgtcagactgcctggttcaagtgcagggctccatgacttaataagctgtggaaccttcttagtttcccatctgcaacatcgggatggtaatagtacttatctcaaaggtactgtgagtgtcaacttaatagataggcagaacttggcataatggatggcatgtagtcatctctcagtcagtgttaggtattgttactgttctttctaggtattatcatttgattaggtcatgcagcctccataactcagaagtttaatggagagaggaaattgggaagcccatcttctgagaggctattgcgtcctccgtctgcttggttatgctagccggctctcctatcctgaacctttcctaggacacacagtcatcaggacttaattttccttttttcatttcagccataattagattgtgagagaaggtacaggaaaagtgacatgcatcccctggagccagcaaggcttgctctcacaggccttcagtacatcctgtcagatgaaggaaggtcttttcccttcagcttcactagcatgaagacaagctttctttttcatggtggtagggatatgtttcagggaaaagagcaggagagaggggtattagagcatttaaacagagattagaactctaggataactatgtctcaagataaaaaggcaggttttaaaatttccatttattgttggaatggtgtctttatttcttctcactttctccaatttttctatagatttcttgcttggtatatccctttaacttgcaaaccaaattccttaaaaggttcctgtaaacctttaaaattagccacagcttgttcacactgtatctagataatgagcattaatacctgttggcttgcagtttccagctctcagagtgtgagacaccagatttcaaaatcaaatgtcagtttcttctgaagaagtgattgaaaggatcagttagtattttgtttttccacatcagattccttttttttaaattgaggcataccttaaaatacacagttctgaagtattcattgaaatgagttttgatggttgtaactactatccaaacaagatacaggacatttccatcataccagaaggtcccatggaatgctgtattttgtttgataccctagctttctttttgggggatctttctttgcccaaatactctgcccctagccttcagatggcagatacctgagccctttccaaagtggttgaatgcctcagagaagtttctctcagctctgcttctctgcctcccatcttaagaaagtggcttccttacacttaagagaggctccatgtatctaagggggaactcttttagctttcctgtccaacccccagtctttcgtgtattacccatgcacttggcaaagaccgtgagaaaatttggtgagtggatgcagacttgatctatgcctaggactcctctgaattctgctctgtcaccccagtctgcatgtagccattaaaaattcgttaaatagaaaaattagttgggcatgatggcacacacctgtagggttatagtgagctacaatcatgccactgcactccagactgagcaatagagtgagactatgtattaatatcttaaaaataagtaaataataaaataaaaaatgtttgacttttttcctcatcttaatggtgagttttttaaaactatgatttttatagggtatctagcttgctttggttgttaggatgggagtgatggcctctcacaattttctataatcccaatcacaagcagaacaaccagtttatcttgatgtcttataatggtatagacaactgtaactcaaatgcatgctgtagatgataaggtaagatttcagattactgcaaatctggctcaccactgtgggggaaaaaactctaaataagtacatcaacaacttaaccttgaggcttttattagtggtatcactctcatttatatttttaaaagcacatattttatcagtcagtactcaaaagggctacagcacgtcctcagattacaccacttcattgtaacgttgatgaaaaaaagagaaattgactctcaggctactgcctatgtggagtttgcatgttcttctcatgtctgcatgggttttcactaggcactctggtttccttccacatcccaaacacatgcatattaggttcattggcgtgtcttaatttcccagttagactgagtgtgggtgtgtgtgtgagtgcaccctgtgatgagatagtgtcctgtctagggatagttcctgacttgcaccctgagctgccgggataggctctgaccactcacaaccctgacctggaatgataataattatcttacttatttttactaatctttcttaaatgtatgtatagctcacatttattttaacatttaatattagaaatgttttgatctttatttagaagtttggtgatgtttttgtgaccaggaatatgccatagggacttaactcttgcttatagtgattagcctatggtaaaactggtggttatacattcattttgcttaaagttccagtttccatgaacctattgatgacactgaggatctactgtaatacagaacctttaattattatttttattattattattacttattatactacccagagatgctgttaatcatgggactaagaaccttcatgatgattctaggaattaacattcatttcatgggaaatggaatgtcgtattaatattcttgtgcaaagcatccttgtgattttctctcaccgagaaagtcaagtgtaaaaaccattctgtccttaaatctccttgaagattacatattcctacttttaaaagtattacgtaaaattttaaatatgcactaaaatagaataaagcagtgaagccccatatacgcatcacctagcctcaatggctttgaacattttgtccatcctgtctcatattatccctcactttttcctttagggaggatactgtggtcttttaaattttaaaataaatcctttggtatgcatactacttttcagaactgcgagcagatccactcagtataacagggtaattctcttgaaaaagatatctcaaaaaatagattgaaatctcttttcatgagatttaccacagttaagatcctcagcaacttgatcattttctttaaatcttttcccccagtacccatttacctaaacaatctgcttcagcccatctggtctatccgctgttagatccccacacaggtgagcattcagtaagtctttaaaactgaatgaagcattgtatgttcccatatcagcatctttgctcttgatgtctctctctctaatactttacttcttttttgctgccagtgcagaaagaaatgcacatctaaagtttgtcgcttttattcccttttgttacagttttgctgtccttctgctcttactcctgctgccctttgaatacgagagttctgcaaaaaccagtccctcttttagggcttagtttaaattttgttttctctgtactcaatgaagatgattattccctcttctgaccatctgatcttcataccactcatttagatacttccttttactgggttatattattagttaatatttaagttaacatactttatttctctagggaaagttttaaaagttgttgttttatttatctttattgtacctgtaaaggttacattcgttcattcatgcacttaggtctcagtgcattttctattttcctgtggccacatttttctattttctagatgtgactgttaactcaaaatattctatatctaattgaaatagttttgccagatttagcaaacaaaaataaaacatgcccagttaaagatgaattttaaataaatattgaataattttagtataaatatgtcctaaatgttacatatgaaacacttatactgaaaatactatttgttgtttacctgaaattcaaatgtaactgggcatcctacattttacccagcaactctaaattgaaagtttattttaatttaatcttgtcctccagataaaaagagtagataaattggtagatatcttccttgaatatgtcatatattccagacatgatgacagatttcgtttgttcaatcaacaatgatttcttcagtgcctaatgtatcccaaattgaattctgctactgtcttgctctgctcttttctttttttttccttattgatgcacagtccctttggtcctcaggcaccatacatttatcatttttagcttttatccatccttagtcaaaacagttactaagtcctgggacgtctctctctctgtctttctctctctctctttctccgtccctctctcttcctccctccctctctctctctcctttctccattcttgcatttcccatcaatctcttttccttttcatccccctaaccagattatttctcatccactataaacacctcaaaagtttttgccaaccccaaagaacttgccttaaccttgcaatttgcatattctaacctattcttttgttatagtatttcttgaaaaaatagtctgtaattgctgttgcaattttttcactcccacgcatttctcagctcattgtactttttttacccatcactctgatgactttttcatagtgttttgtggtatcttcacttccattgtggataccctagatgttttacactcttttttcctgcacatttttcccttgtagttttattgtcttacaactgcaatgatcagctctttcctgatgactcctaagtagatgtctctaaacttgacatctctcctagatctaggtctcagacccactagatatctctctgaatattttcaaacttacaacagtgaacattgaggaagctacaataaattgtaataaaacattacacgcatcgtaaggaaaacagataatgtgctaagagaattctaacaggcagaaaggacttctgagattgtgttcccatttgtcttgttctttgttttcttcagagacaggattttgctctgtagcccaggctggcatatagcggcacaatcatagctcactgtaacatcaaactcctgggctgaagtaatcctcctgcctcagtctccagagtagctaggaccacaggcatgcaccacttagcctggctaattaaaaaaaaaaataatggagatgaggtcttgctatgttgcccaggctagtctcaaattcctggtttcaagtgctcctcctgccttggcctccctaaatgctgggattacagatgtgagccaccatgccagtactgtcttgttcttaaagttctgatttaaccgtttaaacagtatgtatagaattttgcataggaaataaagatcaaaaccatagagatgtgagaaccacttgtaagggctagagggcagtagcagtgagatgagttaagggtctcctgtattaaggccagaggagacaacagtggcttgaacatcaggtgtagcagtggtcataggtaagtttgttggtgaaatggaccctgcctgaagttttatggaattaaccttcactgacatcagcttatatggaacaataatattgaaataatacagataatatagatgtgttttcagtgatatctaaatagaattgtttattagctagaatttaagttttatgggagtaggaaactttgtattctgaaatgccaaatatgctgagatatgtgcatgccacctacagtttttatactgaagtccttaatgaaaggtggtatttggagactcaagtttctggatagtgatacaaagaatcatttgaggcttacaaaatagtgatcatttggcattttaagttgatgtaagcaagaagacatgtctgtcatttcatgtacatctgtatagtcttcacctcaacctgaatctctgtaagaaaatcaatagaacttcctgtcaggattgctttaatgcaacttatctgtgggcaactctagttatagagaagaattctgctggtattaaagtgctgaagtgaaattatgttaaatttttgctgattttaaaacaaagaaacctgttagctattatgacttctaaactttaaatgtatgctgctgtaaacatccatatgcagaaacctcaaaaacaaaatgagatatgattaatcacctttcagaagcagagtttgataaaagcaagaatgcagttcagctgtttacaagttgaagcttctataggaaaaatatttcagggaaagatatatagtttgttttttattgacttatgtaagcactttaccttttgagctctataaaaaaatgaactctttctgggaagagattcttcttttatgactatattactcatatcatgacaattcattgaatagtaaaagacattgatgatgtgtttggtgtgaggtagaactcttgtcttcaaaggacaggagaaatttatctttccacatttatttgcaaggtgttttcaaataactcttctgatagcatatgacatatccattagccctggacctaagaggagtaagttatgggtatttagaatggttctaagctgagacacccagtcccttccacccaaccacattggcatccatttagataggtacaattttgaaaatctcttcccaggaaagagccagattgtcacagtatgcaagaaagtgttgtgcatagcaaaagaaacttaggtaaaggatatttaagaagattcaaacatcagtataagggcgatctgtgcagaaattttattaagcaaggggatgagcaaccaggagactgcttgtcacataaaatgttcaggcagagaatgaatgttcatctttcaggactattgaatactaagggtgatagatctgattaaatcatccaagtttcctccaaactctgatattttagaaaaggtttcttaggcttagaggccattaacttttggttgactggtaattcaagtaagtcggctgttatagaagcagattcagatatagggatttggggtgcgtgtgactttattgagacagtggtctcaataaaagcagattgagagaagcagtataagacagggaagtagttaaacaaggatatggtttcagctgagttttgcttcagcctgatcccatgggagctgtggagcataaattgtgcgtagagttgctctcacctggagacgaagagggtatagttttagaccccggttagtattggtcagtaatcggctatgagagggcactacattgcaggtgaggtggctcttaaatggctaatggcagttctctagagaaaaagacagctgtgaattaagagcagctagtactcagagcaactgggggatgggtgtgctggccctatctactatgctagcaaaaggattctcctatgtattagaaacaaaaaataggaacaagagtgagctgctagagggaagcacagcactgaccccacaacagccatacatgaaaactgaccatatgtttgaggccatgtaacatggagatggatattccatacacaactacatagccttaaaggcatcacagcacatacaaagaacagatgctcataatgctgacctagagtcaagaagaaaaaaatctatactttattagaatatgcaattgaaaaagcagggaccatccatatttttatactttaattgcttaaatcaccagtccctagttatttagaaaagaaacagaatagttgtgaaagtgcttggtgagtagttaacctattacaacttttagagcattaaccatagggccatcaggtagacacgtaagaagctgtgccttacaaaggtaagtactttttgaaaaagggaaccgttttagagagtcttacattttgagacttagaatattaatgtgtctcagtttactctcaggaaggtgtgcaggaaagaagtactttgtggtttctattgaacaagtgggcgattttaaggctgttgcccaaactaggtaacaaattgcatcattctcattgtattttcaacaattgccaccctcttggcccatcttatctgttattccatgaacacctcatcaagtttcaccctccagtgcttattttcaaactgttttacagaaacttttggtataattcctatagctcatcaagtatcaaaggctgctttttatatgtcaatgttctctagaaaaattttaatgtttttcttcttcagtaccataatactacctttgactgggcatttttgtcgaagaaggagtgttcaaaatacggaggaaacctcgtcgggaacaactgtaattttgttcctgatatcacactcatgtcttttatcctcttcttgggaacctacacctcttccatggctctgaaaaaattcaaaactagtccttattttccaaccacagtaagtacctgaactttaaatgattttcattggatttacactgtatcaacaataatacaactttacaaggtgaaaaaggcacctgtaattcaatgtgtccaatataattttgtgcgttttaaacattacacttcaatctttgttcatgtgcatacttattaacgtaagtctagtcaagctttggaaaaccttccaaggactttctcacataattctgtcatatacctctcataattctgaatgtgctgaaaggaaaaaaaatgagatgaattatatttaaaaatgcatgagtgaagaaaaataccttttaaattcattgtgtttaagtacataatcaaaaactcttcatgtttatcaggaatttccatggtgtagaatttcttcagcagctgtacatttgagtattttagtacttgaattatgggctgtgggagtaaacttaaattgtgttgttacacaagtattggtgtaagatatgactgtcatatgagccaaactttccttcccgtaatgatgaatgccgtagtacagagaaacagataattaaactgggttgtgcaaacatcctgtctcccattaaaatgcctgagtgagcttagtccaaactgtgggttcatggagatgctataagaaaagactaatatttagttaatggcattttggttttttgcctgcagaatcaaactaagataatcctttgctttacagttcagttcttagtgtttaggatgtcagtatttcttaggcaatcttgattacacctgatttatatcagtgacctgctctgtacagctgacatctcatgaaacagctcttcttgcattatatgtaaaaggaatggaagaattttaaaatatgagatgcacttgatgaaattcctttttccaaattctaggaaatgaaaatatatttactttcacctagaaaatttttgactctctgattcttcttacaaaattgaaaataaacagaagggttgataatgaaatgtctagaagtagatagcccaaggaatgaaaaatttccacaaagtgaaatttagaaagaagcattcaacttagtctgcttaacatgggcattacaagctggtgatccacaggcagaaagaattcaacccacagccattctttgtttagcccacagtgtgtatacatacaaaaaaacacactctctctctcttacttgagacttttggtagaatctgtactttgcagatagttactgttttcccagctctgtgttgtctaagaattggctgtttcatgcattcagattaactgcctgttcttaaagacactgggaaatgtgctttcttgatacacctcttcaactgtgtgggttttgtgtagaacagattcctgggtaaaagtctttgaggacaattttttttttctcttgaggtttttccttcttaataagtaatttattgggcatcttggattttgtttgtttgtatttttggcttatactttgtaaatcatcaccacctgccaaagtctgatataatttaagtatagtaagtagaaaagtggaaaatttgtgaagcacttataagtcataatttgcaaaataaactagtttcaactttgagatgaatggagatcctttttctaaattttaaaatcttaattgaccaataataatgtaaactatatatttctggagtacaatgtgacatatgtatatgttgtggaatgattaaatcaagctaattaacatatccattacctcacatacttattttttgtgatgagaacatttaaaacctactcttttagcaattttaaaatatacaacacattattattagctatagtcatcatgctgtgcagtggatctcaaagacatattcctcttgtctgatactttgtacgctttgaccaatatcctcccattccccgcctccagtaggcaccattctactgtctacttatatgagtttgacattttaggtttcacgtgtaagtgagatcatgtagtatctgtctgtctgtgcttggctcatttcacttaacataatgtcttccagataacataatgttatccaaattattgctaatgacagaatttcctttgttttatggctggatagtattccactgtttatatgtgccacattttctttattcatctgttgatgaacacttaggctgattccatatcttggccattgcgaataatgctacaaagaacatgagagtgttgacatctctttgagatcatgatttcatttcttttggatacatacacagaagtagggttgctggatcatatagtagttctggtttttattttttgggggaaactttcatactgttttctgtaatggctgttctaatttacattcccaccaacggtgtacaagggttaccttttctccacatcatcaccaacacttatcttttgtctttttgataataaccatcccaacaggtgtgaggtcatatctcattgtggatgtaatttgtagttccctgatacttcatgatgttgagcattttttcatttatcttttggccatttatgtttcttcttttgcaaaacatctattcaggtcctctgtctatttattaggtgaattgctgttcagttttagtttgatgcaatcctgtttgtctatgtttgcttttgttgtcaaaaaataaccttatgttgaagtgtaatgataggttatttgatattaacaataatctttgcccagactaatgtcatggagcttttcctttatgttttcttttaataattttacagtttcaggtcttatatttaagtctttaatccctggctattttcttttttttgtatttttagtagagacaggatttcaccatcttggccaggctggtcttgaactcctgacctcgtgacccactcgccttggcctcccaaagtgccgggattacaggtgtgagccaccctgcgtggccttaatccattttgaattgattattgtatatggtatgagatgagggtctaatttcattattctgcatgttgatatctagttcacctagcactatttattgaagagattgctgttaccccattgtgtgttcttggcatctttgttgaaaatcagttggccataaatgcatggatttattcctggactctgttctatcccattggtctagatgtctgtttttctaccagtaccatcctgttttgattactatagttttgtagtagattagtgtgatgcttccagctttcctctttttgctcaagattggtttggctatttggggtcttttgtgatttgatacaaattttaggattactttttctatttgtgtaaaacatatcattggaatttggatagggtttgctttgcatcagtagattgctttggtagtatggactttttaataataccaattcttcaaattcatgaatacaggatatctttccatttactcctgtcttcttcaatatctttcatcaattctttataatttttgaagtatagcacattcacctccctggttaaatttattcttaaatgttttattcttttgtagctattgtaagtgggattgtgatttttttttcagataggttgttgttggtctatagaaacactactgaattgtatgttgattttatattctgcaactttacttaatttttttattacttctaaaatttttttggtggagtctttatgtaagatcatgttgtctgctaacagagacaatttaacttcttcctttccttcctttcataggttatatgtgtctaggaatttacccatttcttctaggttatttagtttgttgttgtataattgttcataagtatctcttagagttttttttatttccttgttatcaggtgtaatgtctctttttaatcactgaatttatttatttcagtcttcttttttttttagcctagatattggattgttggttttgcttattatttatttatttttatttttaatttaattaattagttaatattttttgtttgtttgtttgttttgagacagagtccctctctgtcacccaggctggagtgcagtggtgccatctcagctcactgcaacctctgcctccctggttcaagcgattctcctgcctcagcctcccaggtagctgggactacaggggcgtgccaccatgggacctggctaattttttgtatttttagtagagatggggtttcaccataatagccagatggtctcgatctcctgaccttgtgatccccctgcctaggcctctcaaagtgctgggattacaggcgtgaaccaccatgcctggcctattttattttatttttgagatggagtcttgctctgttgcccaggctagagagcagtggtgccatctcagctcactgtaacctcagcctcctgggttcaagggattcttgtgcctcaacctcctgagtaactgggattacaggcgcttgccaccgcgcccactaatttttgtattttttgtggagacgaggtttcactatgttgaccagactcatcttgaactgttgatctcaagtgatccaccagcctcggcctcccaaagtgttgggattactggcgagagccactgcaccccggctgattttgtttatctttaaagaaacctcaacttttagttttgttaatttttttaacttgtcttagtctttatttcttctttgagttttattatttccttctttctaacaattttgagtttagtttgtttttgtctttctagctccttgacatgcttcctcaggctgtttattagaaatcttctttcgatgtagtcatttattgctataaatttcactcttagaactgcttttgttgtgtcccatgggttttggtatgatatatttccattctcatttgtctcaaatttattaatttcatttttaatttgtttacttacacattggttatttagtagcatacatattcaggagcataaacttccatgtgtttgtaaaggtttcaaagttttccttattgttgatttatagttttatattgtggtcagaaaagatacttgatatgatctctgttttcttaaattttctaagactagttttgtagcctagcatatgatctgtcctggagaatgttacaaatgcagttgagaagaatgtgtattctgtagcagttggatggaatattctgtaaaggtctgttaggtccatttgatgtatggtgcaactgaagtccaatgttccttgttgattttctgtatagatgatctgtccattgttgaaaatggggtattgaaattcactattattgtattgtcttctgtttctccctttagatagaataataatatttgctttatatgtttgggtactctgtgattaggtgcatatagatttataattgttttattgaatcgattcttttattattatataatgaccttctttgtcactttttacagttttcgacttaagtatattttatatggatacctctgatcacttttggtttccatttgcatggagtatctttttccatcctttcattttcagtctgttgtccttaatagtgaggggatctctagtaggcaaactatagtttggtctttttttttttttgtccattcattccctctgtatcttttcattggagaacttaatttcatttacattcaaggattttattgataggtaaggacttactcctatcattttgttaattgtactttaattattttaatatccttcattcttttcttcctctcttgtttacctctgtggtttggtgctaagctttgtttcttttccctttctcatgtgtttatcagctgtaatttctatctttgtggttgccatggggctaacataatgagtcttgtaattataatactctattttaagctgataacaacttaactttggtcacgttaaaatactttagacttttttgctccctcccacaatttatatgtttgttaccttaatttactttcttatctactgtgtgtttcttagtcactaattatggcttttcttgttttcgaccattttaagtttaaaccttcatactagagattgaaagatttatgtagcaccattataattctgtgtttgattatgaatttacctctactggtgagttttatactttcatgtattttcatgataataaatatcatccttttgtttacagttgtagctcttaagcattttttataagactgatctagcaataatgaattccctcagcttttgcttgtctggaaagatctttattatagctttgctggatgtggtattggctaacagttggtttttgtttccacactttgaatatattatcccattctctcctgactggcaagatttctgctgagaaatctgttaatttcctaatggagattctcttatatgtgacttgatgcttttctcttgcagcttatagaattctctctttgtctttagcttttgacagtttgagtattaatatgccttggagaacattgtttagggttcagtccagttgggaacttttgagcttcttggatcaggacatccatatttctcccaagactttgaggttttcagtcattattttgttaaataggttttctgttattttatttgtctcttctttcactgtcacacatataatgcaaagatttattcacttaattcttatttattttttcctctgacttgattgggttaattcaaaagatgacttcaagttcaggaactctttcatcttcttgatctagtctgttcttgatgctatcagttgttttttttatttctttcactaaattcttcactgccaagatttctgtttgattcttttttatgatatctttcacttttttgaatttttcattcagatcatgaattatttttctgatttcactgaattgtttgtattctatagtatctctctgagcttctttaagatcattattttgaattccttttgatctattctataaatattctttttttggacctcctactgaagacttattgtgtttcatgggggggggggtgttattattatttttcttttttgctttttttgtattttttttaaatatccaacctctattctaattcagggtacatatacaggatgtgcaggtttgttacataggtaaatttgtgccatggtggtttgctgcacagatcattccatcacccaagtattaagcccagcatccactagcttttcttcctgattctctccctcttcccacctccccctcccaacagaccccagagtgtgttgtttttctgaatgtatccatgtgttctcatcatttaacttccacttataagtgagaacatgtggtatttggttttctgttcctgcattagtttgctagggataaatggcccctagctccatccatgtccctgcaaaggacatgatcttgttccattttatggctgcatagtatttcatggtgtatatgtaccacattgtctttatccagtctatgactgatgggcttttaggttgattccatgcctttgatattgtgaatagtgctgcagtgaatatatgtatgaatgtgtctttataattgaacaatttatattcctttgggtgtatatcctgtaatggatatataaaactttatatataaaatggatatatataaaacttaaaatatatccagtaatggatatatacccaaaggctttttctccacaactttgccagcatctgctattttttgaccttttaataatagccattctgactggtgtgagagaggatctcattgcagttttgatttgcatttctgtaatgattagtaatgttgaggtttttttttttcatatgtttgctggccacatgtatgtcttattttgagaagtgtcttttcatgtcctctgcccagtttttaatgggattttttgtttttttcttgaagttccttatagatgctggatattagacctttgtcggatacatagtctgcaaaaattttcttccattctgtaggttgtctgtttacaatgatgatcgtttcttttgctgggcagaagctctttagtttaattagattctgtttgttaatttttgcttttgttgcaattgcttttggtgtcttcatcgtgaaatctttgcccatgcctgtgtcctgaacggtattgcctagatttttttctagggtttttatggtttggggttttatgattaagtatttaatccatcttgagttaatttttgtatatggtataaggaagaggacaagtttcaattttctacatatggctagctagttctcttggcaccatttattaaatggggaattatttcaccattgtttgtttttgtcaggtttgtcgaagatcagatggttgtaggtgtgtggtcttatttcttgattttctatttagttccattggtctatgtgtctgtttttgtaccagtaccatgctgtttggtttctgtagccctgtagtttgaagtcaggtagcatgatgcctccagcattgttctttttgcttaggattgcattggctatttgggctcttttttggtttcatatgaattttaaaatagttttttctaattctgtgaagaatatcaatagtattttacctggaatagcattagatcttcaaattgttttgggcagtatggccattttaacattttaacatattgattcttcctattcatgagcatggaatgctcttccatttttttctgtcatctctgatttccttgagtggtggtttgtagttctcattgaagaggtccacttccatcattagctgtattcctaggtattttattctttttgtggcagttgtgaatgggagttcatctgtgatttggctttcgactttcctgtggttggtttaaagtaatgctagtgagttttgcacattgattttttatcctgagacttagctgaagttgcttagcagctcaagaacctttggggctgagatgatggggttttctagatacagttttatataatctgcaaactaggtagtttgactcccagtttggaaaacgcatttcaggatatcatccaggagaacttccccaacctagctagacaggccaatattcaaattttggaaatgcagagaacctcagcaagatacttcacaagaaggtcgtcctcaagacacataatcatcagattctccaaggttgaaagaaaagaaaaaatgtttagggcagccagagagaaaggcaagatcacctacaaagggaagcccatgagaccaacagtgggcctctcagtggaaatcctatgagccagaagagattgggggccaatatttaacatcttaaagaaaagaaaattgaacctagaatattgtatctcaccaaactaagcttcataagcaaaggagaaatcaaattattttcagacaagcaaatgctgaggaaattcgtcatgaccagacctgctttacaagagctcttgaaggaagcactaaatatggaaaggagaaacccttaccagccactacaaaaacacactgaagtacacagaccagtgacaccataaggcgaccacataaacaagtctgcaaaataaccagctaatatcatgatgacaggatcaaatccatacataacaattctaactttacatgtaaatgggctaaatgccccagttaaaagacacagagtggaaagctgcataacaaaccaagactcatttgtattctgtcttcaagagaccaatctcacatgcaaagacacacataggcttaaaataaaaggatggaggaaaatttaccaaacaaatggaaaacagaaaaaaagcttgggttgcaatcctagtttctgacaaaacagacttcaaaccaacaaagatgaaaaaagacaaaaggtattacataatggtaaagggttcagttcaacaagaagagctaactatcctaaatagaaatgcttccaataagggagcaccaagatttaaaaagcaagttattagagaccgtcaaagtgacttagactcccacacaataatggtgcaagactttaataccccactgacaatattatacatatcatcaagagagaaaattaacaaaggtattcaagacctgaactcagctctgcatcaggtagacttgatagatatctacagaactctctgccccaaaacaacagaatatactttcttctcatcaccacacagcacttactttaaaattgatcacataatcggaagttaaacactcttcagcagatgcaaaagaactgaaatcataacagtccctcggaccacagtgtaatcaaattagaactcaggattaagaaattcactcaaaaccataaaacatggaaattgaacaacttgctcctgaatgacttttgggaaaataatgaaattaaggcacaaatcaggaagttctttgaaactaatcagaacaaagagacaatgtaccagaatcactaggatgtagctaaaacagtgttaagagggaactttatagcactaaaagcccacatcaaaaagctagaaagatctcaagttaacaagctaacatcacagctaaaagaactggagaaccaagagcaaacaaacccgaaagctagcagaagacaagaaaaaccaagatcagagctgaactgaatgaggtagagacatgaaaaacccttcaaaagatcaacaaatccaggagctggttttttgaaaaaattaataaaatacataggccactatctagactaataaagaagataagagagaagactcaaataaacacaagcagaaatgatacagggggatatcacaactgaccccactgaaatacaaacaaccattagagaatattatcccttaatagtgtttataatataaacacctctatgcacatacactaggaagtccagaacaaatggataaattcctggacacatacaccttcccaagactgaaccaggagaaagttgaatccctgaatagaccaataatgagttctgaaattgaggcagtaataagtagcccaacaacccgaaaaagcccaggaccagatggattcacagctgaattctaccagatgtacaaagaagagctggtatcatttctactgaaactattccataaattaaaaggagagacttctccctaattgactgtatgagtccagcttcattcttataccaaaacctggcagagatacaacaaaaaatgagaagtttagccagtatccttgatgaacattgatgcaaaaatcttcaacaaaatgctggcaaaccaaatccagcagcacgtccagcttatccaccacgatcaagtaggcttcatctctgggatgcaaggttggttcaacatatacaaatcaagaaatgtgattcatcacacaaccagaactaaggaaaaaaccatgtgattatctcaagagatgcagaaaaggcctctgataaaattcaacattcgtttatgttaaaaactctcaataaactagttattaaaggaagatacctcaaaataatgacagccatgtatgacaaacccacagccaatattatactgaatgggcaaaggctgtaagcattctccttgaaaaccagtacaagacaaagatgccctgtctcaccattcttattcaacatagtattggaagttctggccagggcaatcaggcaagagaaagaaataaaggctattcaaattggaagagaggaagtcaaactagcctttttatatttcttgtgtctctatgttgatatcacacatctagtgaaatagtcattttttaaaattcatggagtatcttttgtagggagggatttttttttttctgtaaatgggtcttagggtgtcatttggtatagtatattggctttcattctgggtagactcagtagcatggttgccatacattttcttcagcttaatttttgtaagcaatctgtgattgccttagtggcctacttcatgggggtttgtgatggtggtagtgtggttttgctaggctctttagaatgcctgggccagtttcagaactgggaacatttgtgcatgatgggtcagcaggctgtgtggccagcaatctggggtttggggaccaggggtgccaccaggtagcctcttgggtaaggagcatggcagactggctagctgttcagtgactttcctgctttgcaggtcctcttgttcctcatgggtgaagatgccccatgggtttgagcaatgggttcttagttgtactgttggttctatgctttgtacacctggggttgtggtgctgcaggcacctgtgtaaacatggtgaaatgagggtgaggcctcaaggatggagagaagcagtggcttctgggtcccaggacaggattccctctaacagttagtccagtttaaagatggtgccatgccatagcaccttagtttgcagggtagagtatatacaacctgagctcctactctggggcaatgcagctgtgtaaactcctagaaactccctaatctgaattttggacttgtgaggacaggggactctcctgtagcaaggacttctggtatctctggtggctatggggatttctgggggcctccagtttgtctttttgtcataataataaatcttccttgattctgagccaatcccagcaagaagatagtgtgacgaagcagaaggatgccttttcctttgtctatcctgggctttcacactccatagggatttcactgcttctccggatctctcccaacataatttctatcactctaatgtaaatgtaattatttatttgctattttggtccctttttgtggagtggatgagtgccaggcaattctagtcggccatcttaatgaagtctgaaatgaaaatttttatgtcttcttatgaattgatccctttatcattatatgatgactttctttgtcttgtttttttttacttacaatttattttatctgatgcaaatacagacatccttgttttcttttggttgcatcctttcagttttaaactacgtgtgtcctcagaggtgaaatgagtctcttttaggcagcatatagttggatcttaaaaaaataatccattcagccattctgtctttttagtggagaatttaacccatttacattcaaggtaacttttataggtacagactttccactaccattttgttaattattttctggttaatttgtagattcttcgttctttccttcctcttttgttgttttcctttgtgattagataattttttccactgtgttttgatttcttactttttatcttttgtgtgtcttctagagatttttgctttgtggttaccatgaggcttacataaaacatcttacaattataacaggctattttaagatgataacaacttacctttcattgcataaaacaattttgtacttttactttatatctcccccaataatttttttatgttttggattttacaatgtatatcttttaatgttatatatccctgaacaaattattatagcaattatcattttaaatagttttgtctttatcctttatatcaaatatataagtaatttacaccttacaattacagtattaattttctgaacttaactatacacttacttttatcagtgagttttatactttcaaatgtttttcagttactaattagaatcctcttcttttaccctgaagaattctctttagcatttcttgtaatacaggtctggtggcagtgaacttgctcagcatttatttgtctgggaaagtatctctccttcatttttggaggatagatggtattcttttttggcaatgttttccccttatgctcttttttttgttttattttggagatttgtcttttatttttcattttttaaggtgtctttagtatttattagaatgtaaataaagctgagtgctaattttctctaaacttaaaaaatacaactttgatctgggcctttgatacttttggtctattttattttatttattgcacaaatttatggggtatgtgtgagattttgttatatgtgtataacaaaaggttataagggtattaagggtatctatcacccattttcaatacatttttgttaagtatagtcactctaaccttttatcaaacattgaatttgatccttctgtctgtatcattatacctataaccaaatttattctctgccctacccccatcacccttcccagattctgttaactgtctttccactccctacctcaatgtgatcaaattttttagcttccacatatgagtgataacatgcactatatgtctttccgtgcctgacttatttcactaaacacaatgaccttcggttttatccatgttgctgaaaatgacattatttaattctttttatggctacatagttttccattatatatgtatatgtcacattttctttatccatttatctgttgatggacacatagtttgatcccatacctttgctattgtgaatggtgctgcggtaaacacgtgagtgcagatttcctatccctttgatatagtgatttcctttccttcgggtagattcccagtactgcgtttgctggatcaagtggcaattctgttttgaggtttttgggaaatctcaatagtgtttccatagtgactgtggtagtctaccacagtctaccaaccatataaaacatttctaccaaccatataaaacatttcctctttctctgcatccttgtcaacatcttatttttggtctttttagtaatagctactctgactggggtaagatgatatctcattgtagttttgatttgcatttctctgatgattagtgatgctgagcattttttcatatacctgttggctgttactgtgtcttcttttgagaaatgtctattcgtgtcctttgcccacttaaatggaattatttgtttttcttttcttgagttaagtaccttgtatattctaaggttagtcccttgttggatgaataatttgcaaatatattttctcattccataggttgtctcttcattgtgtagattatttcttttgttgtgcagaagctttttggtttaaatcccacttgtctatttttgtttggttgccaatgaatttcagatcttaatcataaattatttgtctacaccaatgtccaggagaattttccctcggttttcttccagtatttttatagttttgggtcttacatataagtctttaatcaatgttgagttgatgtttgcatatggtgaggtaggagtccagttgtattcttctggatgtgggtatccaattttcccagcaccatttatcaaagagggtatactttacccaatgtaagttcttgtcagcttttttgaggatcagttagctgtaagtgtatctttatttctggattatctactccgttctgttggtctacgtgtctatttttatagcaatactatgctgatgtggttactacagcattgtaatatatcttgaagtcagataatgtgatgcctccagctttgttctttttgctgctcaggattgctttggctattcaggcttctttgtggttctatatgagttttattaaataggatttttttttctaattctgtgaaggtggcagtattttgaaacagatcgcattgaatctgcagactgctttgtacattatggtcattttaatggtattaatgcttctgatccatgagtgtgggaagtttttctatttgtggcctcttcatttcatcagtgttgtgcagttttctttctagagatgtttcacccccttggttaaatttattcctaggtattttattttattgtattgtatctcttgtaaatgcaattaccttttaaattattttcttggctagatcttggtgtatagaaatgcgactgggttttgtgtgttgattttgtatcctgcaactgtactaatttttttaatcaaatctaagagatttttgatagagttttggggttttattagatgtaagactgtatcgtcagcaaagaggcacaatttaacttccccttttccaatttggatgtcttttatttctttctcttacctggttgcttcagttaggacttccagactgtgttgaataggagttgtgaaagtggatatccttgtcttcttccagttcttagaggaagggctttcaacttgtcctcattcagtatgacattagtggtgggtttgttgtacaaggcctttattattttgaggtaggtatgttccttctattcctagtttattgagagtttttatcatgaaaggatgttgtattttatcatattgtttttctgcattgattgagatgactgtatgatttttgttctttatactgttgatgtgatgtcacatttattgatttgcatttattgtgctgagctatccctgcatccctgggataaatcccacttaattgtggtatattatcttgtagatgtactgttggatttgggttgctggtattttgttgagaatttctgcatctgtgcttatcagaagtattgacctgtatttgtctttttttctattcttgtctgtttttggtatcagggtgatattagcctcatagaaagtattaggggatgatatggtttggatttatgtccccacccatgtctcacgtcaaattgtaatctccagtgtcagaggtggggttggattatgggagcaaatttcccccttgctgctctcatgatagtgagttctcacaagatctggtcatttaaaaatgtgtagaacctcccccttcaccctcttcctcctgctgcagccatgtaggacatgtctgcttcccgtttgccttccattatgattgtaagtttcctgaggcctccccagccatgcttcctgtacagtctgcagaactgtgagccaattaaaattcttttctttataaattacccattctcaggtaattctttaaagtaatgcgataattgactaatacagaaaaattccctcctcttcaattgtgtggaatagtttgaggaggattggttagttctttgtttttggtagaactccacagtgaatctatctagtcctgggattttcgttattgggagacattttattactgattcaaaatcactactaatgatggatcttttgagattttctatttcttactgattcaattttaattggcatgtttccaggaatttatccatttcctctaggttttctagtttattattctatacttgttcataatagtctctcacgatctttgtatttttgttgtatgagttgtaatgtgtcctttttcatttctgattttacttggatgtcttctttctttttttcttgtttagtctagctagcagtttattggctgtgtatattttttgaagaaccaactttttgtttcattgattctttgtatttttttagtctgtatttgttagttctgctctgatctttattatttctttttttcctgatagttgtggatttggtttgttcatggttttctgtttccttgatgtgcatttttagattgttaacttgtaatctttctacttatttatttattactgtaaacttccttcttcatactgttttgctgaattccacaggtttgggtatattaggtttttattttcagttgtttcaagaatttttttgattttcatcttaatttctttgttgactcaaaggtcattcagaagcacgtttaatttctatatatttttataaatttccgaagtttatatttgtatttatttctagttttattccattgtggtctgagaatatagttgatatgattttcattttgtgaaaatttttagaaattgttggtggcctaatctatggtcagtcctggataacattccatgtgctgatgaaagaaatatatattctgcagttgttaggtagaatgttctgtaaatgtctgttaggttcatttggtctaaagttcagtttaaatcggtgtttctttgttgattttttaaatctagattatctatttaatgctgacaacggggtgttaaaatcttctactgttattgtattgcattccgtcttttcaggtctagtaatatttgctttatgaatctgggtgctccattgttgggtgcatctatttttagaattgttatatcctcttcctggattggttgctttatttcatataaaatgacttttttaaaactgttcttgactcaaagtctgttttatcttacgtaagtatagctactcttgctcacttctggttttcatttgcatggaatatctttttccatccctttagtttcagtctatatgtccttactggtaaggtgagtttcttataagtagcatatagttagatgctacttttgtaagtccagtcagcagttctatatcttttaagtgtagaatttaatctgttaatatttaaagttattatttatatgtgaggcttcatttctgtcatattactaatagttttctgttgttttgtatattctttcttcctttctttttctcttattatttgtggtttgggggatttctttttttttttttttttttttttttttttttttgagatggagtctcgctctgtcacccaggctggagtgcagtggcatgatcttggctcactgcaagctctgcctcccgggttcacgccattctcctgcctcagcctctcgagtagctgggactataggcacccgccaccacgcccggctaattttttttgtatttttagtagagatgaggtttcaccgtgttagccaggatggtctcgatctcctgatctcgtgatccacctgccttggcctcccaaagtgctgggattacaggcgtgagccaccgcgcccagccaagggatttctgttagtggtactatttgagtcctttttcttactcttttgtgtgattgcttcaccagtaatggctgtgctcccaaaatggtgccctgccatagctgctcaggtcttagtggggtgtgagtgacccagtgcaaattcccagtctggtgtactgccccactgggtttctaaaccaccacccttgctaatgtcagtgttcatgtgggtagaggagctcttctgtatttcagattgcagccgactgtgtaagggatgtggaccactgaagttctcttaattaccctttccctgcaatatggaacccctctagtctttctagccacttgctttcttccttatctgtgcctcaggtgttttctgtgagttccttcttggactcttgtggtctctcctatgtgttctattcgaggtatgtttctctagtcataattttggttcttctttctggaaagagtaggtgtctgtagtcagccatcttgcatcagaatccttcttcagctctttgaatatatcatcccagtctctcctggattgtaaagcttttggtgcaaaatacactgctagtattgttggaactctcttgtatgtgatttgcttcttttctcttgctgcttcaagattttctctttgtattatattttttgtcaatttcattatatcttgatatagtatttttatgttgaatctgattgaagacctttgaccttcctatagctagatatttatatttccctagatttgaaatattttctgctattatttctttaaataaacttcctacccctttgtctctctctttttcttcttgctctcctataacttgaatatttgttcttttgatcctgtcacataaatcttataaactttcttcattctttttattgttttttttctctactgactatatattttcaaataacttgtctttaagttcacagattcttctgcttgatcagttctgctgttgatgctctttattgcatttcttaattttcttaattatattttttggctccagaatttctatttgtttttcttttaataatttcatttaaaattttgaatgtaagtaatttcagtctctgttacatttctagttttggtcatttattgttttcttgattttgtagcatcctgtctttttagaaagtttgctgggcttccttaaaataattattttgaattcttcgatagttcatatatcttcatttttgagggatgattactggggctttattttttcctttagtggtgtcatgtttccttgattgttcttggtcttgtagctcctgatttgtttctgtgcatttgaagacatagagactaatttcagtccttgcagaatgtctttgtctggaaaagtttttcaccaatcagcctgtctagagattatggcaggttttctgttgtgttccacaggcaggcttgctgcaggacttcccagttaggctgacctggttcttgtgtaaacaggtgagtgcacctggcacctgggtccatggtttggaactggagcctaagtccttgagggcaggcctggggcctgggtccatgagggctggcctagaacttgagtctgtaggagtggtccaggagccttggttcaaggagtcttcctggcttcaggatgtagtggggtgggtgtggaccctgtgtctactagagcctggctccatgggtaccagcctagagcctgaggctggcttggtgctggggtaggtgtagagtttgggatcatagaggctggcctaatgcctgaagccaaagtgactggtctggtgcctgtggctgtgggggccagcctggaagctggttgtatgggtgcttgcctggagactaagtctgtgagggctattgtgggtcatgcaaccacagaggctgtcctgaaacatgggtctgctgaagtgggcctggatcctagatctgctggagtgtggggcttaagggtctagcctggagggtggagccacagggactgacctggtactgggcaagcctggagcctatatgcatggtacttacctggtgcctaaggccaggggtgctggcatggttctgcagcaggcctgaagtctggggctctctgggctgacctcactctacactagtctggaacctggggtgggcctggagcctgaggccacaggggctgatgtgatgctggacaggcctggagcctgtattggcagggactggtctggaggctgggtctgcagctggtgacctgaggactagggccatagagtctggcctggtgctgggggtgttcagagcctattatacctggggttaccctggacctggggctcatctggagcctagggccactgggtttggcctggcagtggggtgggcccaaagaccaagtccccagagcaggccaggagcatgggattgctgagccagcctggtgtgggggcaacccggatcagtctgtggttgatcctagagtctggggttctctaccaactagagtctggggttgtgggggcctacccttcatttgggttttaccgggacagacctggtgttggtgtccaaggcaaagactggtactcatttccctctcctctcaaacagagggtttccctctccaggatgtgttgcctgaggttgaagaaggggtaatgtggagagtgtaaaactgtccttcctaccttcttcaatgtgtcttttcttatttctatgttaatctgttcccttagctcttgtgaaagtattttaatcagtgcctagttgttcaaatttatgtttctgcagggcaatgaccattggaaagtcttagtctgccatcttgctgatatcatttcccagactaaatagaatggtcattttaactttctatgtatccaaaaccttttccttctggcagtaacacccaagttgaggataactcttcagacttaaagaaattctcccctcataagagcctaagcaggtaatttctcagtcattgataaatattgctaagaatgtcatgacaatgtaaaactagaataatgatagcattctagttacaattcttttaaagaaagttctcagcatagtttagaattgtatataccaaattataaaatacacagagaggagaaagtatgtgtgatttctaaaggtcagtgtgtaactgtgtaggttttcagtctgtcatcctcccttataccccaactcatttcacatttacagctaagtaataatatatacataaatacatatgcatacataaatgaatattaagaacatcattttttttgacagagtctcgctctgttgcctaggctggagtgcagtggcatgaccttgggtcactgtaacctccgcctcctgggttcaagcaattctcctgcatcagtctcctgagtagctgggtttacaggtgtacaccaccatgcccagcatattttgtatttttttgttgttgtttttttagtagagactgggtttcaccatgttggctaggctggtcttgagctcctgacctcaagtgatctgtccgccttgccctcccaaagtgctggtattacaggcgtgagccactgcacctggccaagaatatcatttttatctctcattcgccaaaatatgttttaatttaagctgacattttaaaatgtggtttctgtaggtaggtgcagacaggtgtatagattctaatatatattcttaaatagtgttttataattaaaacatatgcttaaacattatacataagacaggcttttatagctgtggaaacaatcaaggctatttttagttccttcctcacaccaacaattcacatgaaacctctaaagactcaaaatgctcatgttgagtgacaatgttcttgccatgcaaaatgtctcattctcctttagcttacacagtcatttctcttttgttctctcatttttaaacatttgtatgagttgttaagactttaaactactttaaaacacttagacttctcttttattagtcagatcaaccagcacaaggtcggatacagactaagtactcaatacttcttgactagtggaaaccagtcaagtacagattagtgctgcattttgtgggaagagcacaatgtgtgagaatccaggacctgtagattctagtgccagcactaccactgactaacaatgtgctctttgatagctatctacaaacttcagttacctcacctataaagggaaagtttggctagatgacaattaacagccttttgagctctagtactttataaatttaaggagttttctggctccatttcctatactcttctaggcttatagcaatgattgaaccttacaaattagcaaaaaataattatctccatcatatcacatctgccagtctctctttgtggatgattcacaattgtcatacagcaaaggcaaattcaaaacatggttgactttcttgtcaaaattgaacttactcatttctctgtatttcttttttttgggggggtggctaggggtgggagagagagacggggtttcactgtgttacctagcttgatctcaaactcctggcctcaagtgatcctcccacctcagaactcctggccttgagtgatcctcccaactcagccttccaaagtgctgggattatgggcatgagccactgcacctggtctgatcaaaattttaaagtcatatttggtgtatgagtcaggattccatcaggaagcaaaggatatgctcaagttaagataatgtgaggttttgataaaggcattatttatgacaggcatgagccaccacatctggctccttatattccttatctcagctaataacatcacctatccttagggccacccaagatcaaaatcttttttcttctcctttattttttttaaatgagatgaggtcttattcagtaacccaagctggagtgcggtggagtaatcatggcttactgcagcctcaaccacctgggatcaagcgatcctctctcctgtcttccgagtagctggaactacagtcacactccaccaggcctggaaaattttttatttttatttttgtagagatggggtgttactgtgtcgcccaggctagtcttgaactcctaggttcaaacagtcgtcctgcctcagcctcacaaagtagtgggattacagatcttagccaccacacatggtctgatcaaaattttaagtcatatttggtgtatgagtcaagatcccagcaggaagcaaatggtatgctcaaattaaggtaatttgaggatttaataaaggcactatttatgaaggtgaggttagagtatatggaaaccacagaagatgtggtgtcccagacagtgagactggggagcccatagtcgaccacacaggttaacttcctaaggcagagagtgtggtagagggggatagaggatgaatctggtgtgacaaagaaagatgtccattgcatgtggcactccaggtttttctttatcaaattaaacttatcacagtccttttctgataagtttattccactgcagtctttctcctttacacttacacttcgattccactcgttctggctcccattacctttgctgaggcccatggtcaatgacccagtctctttccatacctcacggagccactagcaatccctcagtatgaacacttaaaatgaaacagattaccttttctaccctgtctatcaggtatttaatttgtgtattagacagttctacagagccctaatgctcagtggaacatgggtcaaataccagtactccattgacagtcttttttgtattcaccatcctttttaaaggggtgtatcagtctgttatcccacactgtaactggtctgttctatcagcctcgagtctttagtcagagtctttagtcaaattctttcagcatcaagacttccattaggaatatcacagcataatctgtgattttctgtggcaggtggctcagggcattaacatgaaatgttcttccagagtcctacaccaacaaatgatcataaacatggaacaaagatgccatcacgcaccttatgtgcctatgtggtggcaaatgaaaaccatagcttaaaaatagagcaggattggggttagtagaaatcagaaagccacagatttgtggtggcaaaatgaaaaccatagtttaaaaacagcagtattgggactagtagaaatcagaaagtcacagaaccgcatgaattaggcaaaattattgatactttgatatagtcacattcagtgtggctggcatatgtaacaggcccaagaatgccattcttaaggaacttcttgattttctaattttcttccttagaatatgcattaattctaaccctcacatgaattggtgtaatcataagattatttttaatatacttccttgttgttattgtcatttaaataaacaaaatcactaaattccaggtaacatcaatagctgtaacaccttctatgctatatttagataatgcagaatgttctttgaagtgtggcgcttcagaaactttaatgaaaacataatgagcattttagttaggtgacagcatttagtttttattgatgtaagacacaggaaagtctagaattgtacaattagctgtattctagaaccatttttttaattgacattttggtctgtggccattctattaaaattgcatgtgtttaggttataaacagccctttacaagaatcagatgacatccccattctggtttcttttgctctcaaaaattatcttggtgaatggtaaaaattgtcaaactaaaacaatatattaaaacaggagtaagaaataatgggcatgtattatatgtctcactttagtgttcgccatcttgggtggcatttgtcttctttagtgacaacaaagcaaacgactctgctatcactaaaggagaaccagattttcaaattcttgaggtattttatatcaaggaaaataatttttaaagtcaaatttgtttttaatccaaaattgtttttatacttattttcttaagaatgacaaagggatatttagttataaatgcaacttagtctgttaaacatttaacaaaaactatacaaatacttcagttcttacagacatatgaccaaaaataaaaacacagtcgacctgaattgagccccaagaaaaataggttgggagcagtgattggccaaaacatttcgagaaagcttttagtggttgcaaagaggtagtctgtggatagaagtaataactttaaccatggaaacctcttggtcctgagcactttcagcttatttatccatcagagaaaagtcaacaacattgaaatccctgcactaacacaaaatggtctcctatcccattttgggattgtctaagttatacatatgactgattaattattatttttaaacttttactcttgtgtattaatataaattgtaaaaccatcttctttttaggccctggaaccctttatgatagtgatttatttgagttttatctaagataactctattagaggttcaaggaatgttgataatttggtcttaatgaattttagtgttaggactttaaacaccatctagtgtaacatcactgctgacatgtgagcttcatgctgcttgaatgcttcctagaacaggaacctagcatcctgcaggcattcttgatagaaacacaaatctacctttccgtagcctctgtccacagggtctgcacttgccatctggagctacacagaacaagttaatttctctttcctgtgatagacttcacatagttgaagacaaattctccctgcaatgtctttaggcctgccatcatttttcttgtgatgtgttttctgtattcccaaatcctccggctgaccttttctagattagctccagattttcagttttaatttagaagatagtaaccagattgagatgtagtattttccatgtggtttgatcatttgcttctggtatacacacattgggtttcttgttctactgtgttcttttgagacagaatggaagaaaaggtcttttagtgattgccaaagtctcctcagcatctttgctgaaccacttcactaggcttactctccttcctgtagacttccattgtcaagctccaagcccgacccagataaattctccagttcatctctcttctttgctcctcaaatctctttgacttagaacttatggcactaaaatcgtagagtcaaaatcagactttccttttattaaattctgattatagtgggtattattgaatcaaagtacagtgaattaggattattgctatgactactattaatgcttttttttttgcatagtgctttatagcattggctactggggggtcatatttcaaacttttagggtattttggtgcctttttgtgattaccaaaatagccataattgtctggcataatttttctttcatgtaaaataaatgcttttttacactgctgtttagcattttccaagcaccacaatcactagaggaattgacatcataagttaaaatgtactgagagcccacagggtgcctgtcgttgtccttgtctctttataacagctgtatccattgagaactgctctgtagactcatggccctttccctccagttaatttaggagcagctgcagcccttgcaaagtgaaaaccaaatgtcctctgggatttccaagaaacctaattcatttttccactgtaaattaactggcttctcactgttagtgtctctatgattgtgactctctcaataattaatacagtatcatctttcatggatattatgtttataatagatttattaagttgttttgccaaagaaggagagaacagcatatgtttatttgaatttccttttccatccacttaatttcttctttgctttggtagtttaaatatttaagctgctggcttcttattagattaattgagatactgtctaattaatcccgcagaggacagaaatattattctcctcttcatttttataattaaaaatagtaaacaaaaatgaaagagttcaaaactagtctgatataaaaaaggcattacagtcttaactgagacatgcttctctttccgtctttcataaattgaggtagaaattatatgctgtagcacatccatgtatcatttttaaaaacttttttcatggcaagctcttgctatctattaattatcttaatttgtgttctcttagattgtgataatttatattcctaagatattgaagtttgagcctggagagacttaacatttgatttggatggacaaccacaatttatgatgtttgttcaagctagatttgagggctctgaagccacaggtttgggcatgaactcttgagggaacaggttttctcatgaaaaccttggcacttctacttttaaccattaccagtaacagctgttaatagtagagaattaggaactatgactttctaatttgatatctttattgatatattgacctacatagcaggatgtttttggagtttttgaaagagatcaagtttgatgaaatgaaagggaaaacaaatgatgaaagaaaatcacatactcttcttttctaaatgcgcttaaaactgtgagaagggcccaaagagagcagttcttatctccttaaagtcggactgagaagtcttatttacagaccccattgtgtatctagtagactatgtactcattgctagacatttttagggcactttctacttctactatgtcagttttgcctagctcaaattaaagtttcattttagtatagagtaagacatgaatagcctgctaaaatagcacccctacctgtcttctctaattaggggatttagagttgaatataacagtggtctggggaaaatcaatttccttgactgtgaagtttaaactggattcaagatctcagaaatgaatatcttaataataaacactctccaggagtgatttctgctgtaattaaactaatattatacaatttaaggggaaggaagtggaaatagaagtttgtatgttatgcagactatatcaccctgactgtgatttttaatgaggttaagcaacactattaatagggtggcttttttctccataaattttaagaactgtaatcctgacatgtattaacatgagtgtttttagctacttttatgcctgtactgtaataatgccacacttgacaagtaagtgccatcacgtatatacatatgtattatgtatatacatcatattatacgtatcattaacatatctctgtttgtttatatgttattagtttctatggctgttttgtcaagtcaccacatacatggtggcttaaaacaacaaaatttatatctgagaggtcagatctggatgtcaaaattgagatctggagatcagaaatctgaaatgggcctcagtgggctaaaatcaaggtgtgggcaggactgcattccttctcgaggctctaggggagaatgtgtttctttgacttttctaccacctaggggctgcctgcattctttggctcatgactcttttcttcaactttatagccagcagtggccagtcaagtctttctcacactttattattctgacactgattctcctgcctccttctttcatttacaagaacccctgtgattacattggacccacctgtttaattcaggctaatcttcctaaactagtggattggcaacattaattttctctgcaaccttaatttgccctagccatgtaacattacatattcacaggttgtgggaattaggacgtgggcatctttaggggtatattatactttaatctgcttaccacagtatctgacttaaattttaagatgagtacactgggtgctatgttaatagtgcactgaaggggcgcaagtgcagaagcaggaagactatgtaggaagctaatgtagtaaaccatatgagataaaatggtggcttaaacagggtggtactagcaatggaggtgatgagaagtggcaggatcctagacatattttcaacataatttgctgaccaattagatgtgggatataaaagaaagaagagttgagtatattccgaagttttaggtctgagcaatggggaaaattaagctggcattaattaagatagagaaaactattcaaagagcaggtttagggtgtcagtggtggggcagtgtgggccagggaagaggagccagggggagatcaagcacttagtttttgcataagtttgagatgcctggtagtgattttagtcaagcaggtctgtcctccaccagggccagaggtataggtcctatgggaatttctgccaaagaattgcagattgaatttacttgccaccgtgtatttcccttctcctctttattaaaaaaaaaaaggaggagagctatctgccttttaaataactatttgtcttccttcagtatatataaaaaatccaagtggaggtgtcaggtagttagatagataattctggaatttggaagagtggtctagcctagaaatataaattttttgttctttagcatgtaaatggcattttaaagcatgagagtgaatgtaatcacttagggagagaatatagataggaaagaagagaccaaagtctgaactctggaacactgcaatctcaagagtttggaggagttgaaaggaaaccagcaaagaagaactagagtagccagtgaagtaggatgcaagtcaggtctgctagatctgatttccaaaatgtcttcagaatgccatagtattcttagatcagaacatggtaactggtatattacagacagttgcttttgaaaaattatattggataattggactatttccatacacatatcctgctatcagagttccttccggatccactgatagttctgcatttactctctgtccatgtaatatgaggtttttgaagtttaatgagatactcttgagaatatatgttaatgccatctttagagggtgatatatctgtgtaggctctgtattaaatatgagagttcagaatggagtaagaaattcagttgcttcattaagctacagaaattataattttaggagatttgacaattttatattcttttgaatatcctcattgttgacaaatttcttttgctttgaatggatttaactttacagagtatctgcagtaatttgtgtgttgttgaatagagcgaaaattggaaaatcaatataacattctagaaggtaattggcatcatataccaaaacacttaaatttttatatagacattgatatagtaactcttctgacaggaatttattctaaggaaacagtcttatatatatgtgcaaagattttttttatgatattgttcattatagtgaaaagttaaaaacaatctaaacagtagagtattagaaaaatagattttaggataaccattcagcataatactatggagtcaacaacgtataatattatggaaaatatcaaatgaaatagaataaaagtggaaaaatcaaaatatcaaacagtatgtgaaaaattctgtatgtacacatatatatggacataaatatgtagaaaaggatatatttgcaagtgttaaaattcatctctacatagtagaattgaaaaacattttcttttttcattattttttctaaatattctacaatgaacatatattaattttgaaacaaaaaatatatttcaaagaagatagaattatggttcttcaggcatgtgcgatagttaatgtgggtaatcaaacagtctttgctcagtactaaaactataaaaggaatttttaatttttggaacaatagcaacaccattaaaagaaatggatagcttcccaaagagaataatttgaaaaacagccctgatttggatttggaagttctgggattttgagggggtgttggggtacattttaaattgagctttaatttgcatagtaaaattcacagattatacatttgtgtaaccaacatccaaattaaaatacagctggtatatttgtctgaaaaaaaatcattgtttttctttcaacagtattataccttaaataatttcttaaagcagtatagatctttcagggcattttctctttgttggtacttggaatcatgcgtcttgatctcactatctcttggagtagtgtggccaaattagcagccccatacatgggctctcagtgatgaggttcagtttgccatgtaggttttgcagggcgtccagtttatggaaagctgagaatgcctcctctaccaactaaagaagcagaattgcccaggtgcctggtagtgactttggtcaagcaagtcagtcctccaccaggaccagaggtatatgtcctatgggaatttctaccaaagaattgcagattgaatttatttgctcccatctatttcccctctcctgtttattaaaaaaaggaggaaagctatctgccttttaaataactatttctcttctttcgaacaacttataggatatttgtgttgcccactagttgcattttctaggtgaggattgtaagggtggtaaataagaactaacttccattttgcctttgcaatgacctctggtcctccagtgatttatgacctactggtctagaggggtgtttgtaacttcctgacatactcctgaactgcttcataggaccatcttttgccagaccaccctgaactgccagtgtcaacactacttgcacaaaacttaataaatgagttttctccagtattgagcccctaagaaacatcctttttttgctgtgactccagatacttctaaccaaaattagctctgagtggcagttccatgtcattaatgggcttttaattttttatttcttggatttgaagtttcatttcaaagaccacctgacagtagatcatttagttattccagtggtctgcagccatgagaacttctagaacttgaaataacaataattaacttatattaggagagtttattatgttccaggcaatattgttaagcactttcatggcttttcttacttaattctgataacaaaccaatgaagttgtagggattattttggctatgttttgcagatgaagtaattgaagctaagaaagggtaggtatttacaaataggaaataatggtgcaggagttccaatagtggttgtgctcccaactgctgtactatattatctacccaaattgattcctgccatctattggttcttaacattattgtgtataattgatgttaagttgctcataaaaggctggccttctcttcctcagtatgtacttttcaagaaagctaaacctagcaaatctagccctccaagaaagaaaggaactccaggccaaaaggaacagctctgatcctgctgctagttagtatcaggctcctgacacctggtaaaggtcaagcattgaacactagggcttttaccttacccaccttgccaagtaattttcattcctcattttagtttctgttgactacctggctgcagtaatactattctctttcaagaaatcctttgtcttcagaggcgtgcatccactcagcccatcactgatctcccttccttcatccagcagcatcagaagctgactgctcaccctgagataacttcataacctctgactcaaccttggttttatttaggagcaggcttccttgtatataacttggctatgagcttcatgaggacatgaattgtatcggttttatttactgtggtatccttagcaccaagaaaagtattgggaactgagtaaattcttgttgaatgattaaattatgtgctaacatgtgtatgcaccgtatgggaagctcaggtatctgtgctctggtaatgcccttagtcctcattagtgccactagagactacagaacaatctcaagcaaacaaatggtatatgctccccttaccaacttgcaaatggccattattcacccacttcatgggaatggtcatagtttaatgctgtattccttaaagcccagaccttgtcctgaccagagaaatttggagagttatcagataatggcagtcacatgcaagaagtggtagaggagagatgtcccacatacgtgagactttaagtactaacctggattgagaaatattttatttgacaaaactagtgcagctgtgacatttctatctttcatcacttgacattactttgaggtcttgatatttacttcactcaagggacagaaacttctaagccctcccatgctagatttttggtgttttcaggctgtcttatgagatttatcttactctgtactcacagtgctgcctcccaaataacacacagaatttctatgttgttgtgcagatttttataatatgtacttagttttcattcttatgcaggtgaccttcatgttgcaagcaggatgagtttatacagtatctcaggggtacgttctatttgattgccctccctgcctacacacacacacacacacacacacacacacacacacacacacacacacacagaaagagagagagagagagagaaagagcgagcgcaacctgttctttgggatacattacattatctagccaggtgatgtactaatacaaaaacaattttaaaaataatttttctgcactctgatacctccttcaatttgttgatgaagctgttgctataaactattagcaaatacaaagttcttcattcagttcaaacacagacaaatatatgtatctggtgctaaatggttcctggtttcttttttatttttccaggcaagaaaactgatcagtgattttgccattatcttgtccattctcatcttttgtgtaatagatgccctagtaggcgtggacaccccaaaactaattgtgccaagtgagttcaaggtaggtgaatgtctatcttttggtcattcctggaactctttttctttctttccccctattctaatttattgtgtttctctttgagttagttttgtacaattatccatattttttttccaaaatcagtccctcttaggctcatatatacatgtagtttaatttcttcactacaattaaatgtcaagactagggtttttatttaaaacaactgataatactattataaactctggcttatagttttagaataaatatccaaaatattttatataacttattaccttgatctatataatgactctgggaaatacgtattgtaactatcatcctcctgattttttcttttttgagacagggccttgctctgttgcctaggctggagtgtggtggtgcaatctcagctcactgcaacctttgcctcctaggttcaaagaatcctcccacattagcctcccaagtagctggtgctgtaggcacataccaccacccccagctaattttttaatgttttgtagagacaaggtctcactatattacccagtctggtcatcatcctgattttataaagttaagattgaagctcaaagaattaagtaaaatgcctaagattatggaactagtaatgtcaagatgtgaagttagaacccaagcctccagaagtctagtctaatactcttttcatgctatgaaactacctaccacacgcatgtatatataatgtgaattgtaattattacaaagtagatataataattacttaacttacgaacctattgatatgtgtaggtaatggataaaatttacattccagtcattcctaaatatattcctagctaatttttcactacaagtcttttatctattttctagaataatcctccttccctccactactgagatcatatatttgctaagaattattaagctagttgcagttttagtttaataactgcttaatgaggaagggatatatatgttataacacacattattttttgaattgtctctgctatcacatattcattagtaaagataagttctcacccattcaaccattaattcatttgagttaatatttattgaatattgagtcaggctctaagctggaaatttgaaatgcattgatgagtaagacaaatttttttccctgacaagctcacatctgctaattgtagtaaaatgaggttagattcagtgacagaattatgagacagatgatgggaatgtcctcagaagagaagtgagactttcttgatagcaaatatggagaaaataattcacagtgttctattttagttttttatttgcattgttgaatgtaaggaaaagcgtaggaaacccttttttttctgtagtagacatatatgatctactgatggaaaacagactaagaactgcaaaaatgacagttttttccagtttttttttgtgattttcctaaaatttacccagttattatagatcattatttcatatgtaaaataagagaccagaatttttacattagttcacttatataaaaacagttatggctttttatatatattatgaagctgttaaaattcggcaatagtataaacaatttcattataattgctaaaacccatgaacaaaattcatggtgatttggtaatttcttgctacctttttactgaatttcttgctatctttttactttttaccttttactttttacttgctacctttttacctttttacatttggagttttcttctggctactctttaaacttaaatcagtttcttccattttgagtccttatcttaaaccatcccaaatatgcaaaatgccattcacttattttccaacagcccatactctttctctactttctttaaagaattgcctcaaaaataacatcctttgggagagttttggtgaataatcttcattctctagctcataactgtttatatttctcaatatgttggttatccaaatataaaagcatgtcttcccgttggttttttcaccaaatagtatatattaacctgataattttctgaaaaatgtcatctgtctttttcaagccaacaagtccaaaccgaggttggttcgttccaccgtttggagaaaacccctggtgggtgtgccttgctgctgctatcccggctttgttggtcactatactgattttcatggaccaacaaattacagctgtgattgtaaacaggaaagaacataaactcaaggtaagtgtccataataatgtctgtcattgccttctactttctttttagtacttgaaaacactaattgattaaaaaccaagggagctttgttgggagttactatagctaatgttccttaagagtccgcagaaccagagatcactttgtattggtacatgtcttcaatataacactttagggagagctcatttaaatctgaaaaaaaaaaaaggtttcaaatcatatttctttcaccagcaaagagaatacaaacataatttactatttagccacagtcatcctacatctgattttagtggagtaactatcctcaataaagacaatgacaatcaaagatttaattaatttatactgagcatctgctttctcttaaatcaactcaggtttattcttaaagattattcagatagttcatggttgtaagctggtggtgtacatcctgttttttgtcttcacatacttgtgtcagtatgttattaaccataaagaagggagaaaaatgctttattttggacattttaaaaatcagttattaactttgttatgagtctaaagaaaatgccttagtggtctgggatatctttcaagagagctgcctaaaatgctcttactttatataatgtttttccagctccagtgacttttttagttgcaatggatttttacaataccatttgaagaagtgagatatgaatggtaacaataataagagctattatttagtggagggctactatgagccaggccatcttctaagcactttgtattatatattaactcgttaacttttcataaccaccatatgagggaagcatgaaaatgcattagagtctgttacccagaaggagaggatattactaagaatagagttcaacacagtaggtatagcaggaaaaatattcaggaaatataaagaattggctgactacagaaacccattgagcagaggaatgagagagatgaggaagattctgataaactatccaagtagggagaacttaaaaagctgtagatcatggtaagaaaggagtaaatcccataataataagaccaggagaagaaaattaaaagctttggtcaaagaagagatgtttagattttgagagtttggaaggagagaaagctgagattgatgaactggtccaaagcatgtggctagctcccgaagcatgttgacaatgacgtccatcaaaacttgtaagttagagtaatgtgagtctggtgaactgaaagtatcacctgcctcaatattgatatgattggaaagtggcacagagcatggtagagaagaacatcatgggaaagttgctaaaaccataagtaaaagtatataactgtcctggaggtcggcatatttagtgatgtggaagggcagaatgaagaataactgggcttcaatacaaggcagttcataaagcacgaaaacaagtgaggtatgctcccatctaacatggagagtaaaacaaacaaacaaaacaaacaaaccaacaaaaaaactagactgtcactaaagaacaaatctctgcaagaaatcagtgctcccaaaggaaaccaagtggttttcacttatgatgaaagaaaaggttgcaaattcagttggaaaattacattaaaatgactttccccctatgcccactcctgccgtgagtagatactgtactgctctgagatacttttaattctaagatcattgagcttctcacattctggtaatgttgggttatttgcacttgttacatggcagctgacttaagaattaagaagtggaagatgctaggccattaaatggttatatctgcaactggcacagccttacttctttactttgctgtagtcaatgggtcaaaatagtcacaggggcagcctccattcaagggggtgaggggggaattctccttttaatgggggaatggcaaggtcgtattacagaaaaccgtgtaagataggagatgttttccagccatttttggaaaataaaatctgctacatttgtactgaaaaatttgccatagtctagatcttggtgattgcttccccgtggtatcatttaagcatatatacatatatacatatatacatatatatatatatatatatatgtatatatttatttatttatttatttttagacagagtcttgctctgtcacccaggctggagtgcagtggcttgatctcagctcaattcaacttctgcctccggggttcaagtgattctcctgcctcagcctcccgagtagctggaattacaggggcatgccaccatgccagctaatttttgtatttttagtagagacgggtttttgccatgttggtcaggctggtcttgaactcctgacctcgtgatccgcccaccttggcctcccaaagtgctgggattacaggcatgagccaccatgcctggcccatttaagcatattcttctgtcttctgtgcttcctttaaattggccatttgatctagaagcttgaggagatatagttttgatattgcatatctatctatctttgtgtatgtgtatatatacacacatataatatatacacacatatatgtatatatgtgtgtatatacatatcctttcttatatgtatatgtatatgtatacacacatatacatatacatatcctttcttaccacgatctacagctttttaagttctccctacttggatagtttatcagaatcttcctcatctctctcattcctctgctcaatgggtttctatagtcagccaattctttatatttcctgaatatttttcctgctatacctactgtgctgaactctattcttagtaatatcctctccttctgggtaacagactctaatgcgttttcatgcttccctcatatggtggttatgaaaaggtaatgagttaatatataatacaaatatgtctacatatatgtatatgtatacacatatgtctacatatatgtgtgtatatattatacatatatgtgtatatatacatatgtgtgtatatatacatatgtgtgtgtatatattatacatatatgtgtgtatatatacatatatgtgtgtgtgtgtgtatatatagagagagagagaaagagagagagaagcccaagactaatttataaaaggccagataactttaaactacaagtttgccttaggaatttcgaggccacagagataatgtgaattccagctctaaacccaattgtagagttgtggttaggaatatccctatcctgggagattctttctttcttttcccttcttttggcattatacccaatggcaaggctgagagaggcatgtgttcccactatctttctctgtggggtattttttttttgattggccaactgagtatgccatgtttagagtgtactcgttttattttgggtggtatctcccatctatgccctctcccacagagcccgagaattggtctctgtcccaagagttcagatggtcattctaattcaggccgtaagcctccaaggattggcacggtctctctcagggcagtcccaggctccagggcttactaactccaaggatttgcttcttcgcgtggctgttgttttttgtatccaattgttcctctttctagtggatgagccatagtttctaaaatatattttctgtgtctttttgagcattttcagatgttctgtattgagagggtttctgatgttggtttagtttaccaaaggctagaaatggttgttgactaatatttttattctgaaaaaaatttgttaacaaattcttaattatgatctacggttggctagatttatcctgtatctttggaggtaaataaatctcctactaatttttactcactatgttttcttattgataaaattcagaatttagaatttcggaagtttaggaatgataaaatacagacatttttaatcttattttcagtagaaaacattagaaaatcaaggtttattagggtttgcctcttaaaataagagttgaatatataaaaaataagttttcatcaccttcagaattgccacttgaaatcattcttttgaataatgagagttatggaataggtgtcagtcttttgtcacaaatctaatgataccagtgaacatttcatcattaatcaaaggcttttcactctgaaaattgttttgttcatattttgttaggaaaggagagctgtggaatatgaacactggagattctgtctaaaattgtaaagggccttaactgctatgaaattgtttcaaaagagaaagctgaaactgagagagatagaagcattgtggtattaaaaacagcatgtttttgggtggcatttgctttggcttccggtcaagtggctctggctgtctgttctgcttgggatgggatccacctttccactctgctgaacacctcagtattgatgtaggaacgccaagacacttggctttctttgaccattattttggttgtttatgccctgcattagccctgcagagtgctcaaaagcaagccagggtcagcaaggtcatgattcctttaaggtcattccctgagtcattggcagaagaaggaatagagtctgagcttcagactgcaaagtcagagatacttctcacaaggaaggtgatttcgagagtgttatagattgggggtaggagggagaaataatttaggatagatatctagaaatagatatgaggtggttgtggcaaccaatttgctctgatatcttttatgggaaaacccttaatttgagggtgttctttttggataactcccaaattcctatttttgccctactttcatttttcctttttatttctactctcataatcctatagactcagtccttttattttatgcctagactcttctaaagggttagccataataaccaatcttccttgcttcattccaaaagccttcattttttttttaaatgctattcttgtatgtcagtcctgtgtttttaaactttcacactttggcccctttaaatctttacctctcaaagaacttccatttgtcctagcctgggttttaagactctttgccagagtaccacgacctaagtttaaaatggctttcttcaaatgctagccagtgctctagtcaaatgaacagttgagttttccttaagcgtgacagtttcttctgctaggtactccagccagaaacctcttctccttacttcctaatgattgctatttttcaaaatcctctccatcctttaagataattcaaatacaaaaacttctcagtgtagctttcacctttaatgtaatttatatttctcttgtttttgctcttagtatatttgtattactctgtggcacagatcacatatttcttttacagtatctgttttgtataattactttatcccttttcttggccaaaatgttttcaaggtcaggaccatgttttattcctcttttcagctctcgtttggcccaccagtttcatatggtagactcaataaatacatgttgatgaattttattctctttggcccacatggctctcagttgttacactgtgtgaaatgggtgataactgcaaaacatataaactctccacttctcaaagtgtgtgcttatattggtcaaagccctgtttagatgtcatcactgcagggagtttttgtgaatttactgtagacatagttaaacacttcattatctgtactttttattatcgtttccaaacctctttgaatctctattcagagtgcattataatttgtgtacaagtctgtgtccccttcttcaattctgagccccttggtgggaggaaccatgtcatggctcttagtgtccccataaatgagcatattgtctggatctttgtgggcccctagcatgaacgtctattctgtgtccctgcatgtcccagtgtttactgctcctcacctctcctttgttatcaactatgtaccacatgtaaactttaggccgctgggctagtctttttctttcatagattttgatttctgtggatttattcctaaatgatttgtactctgtattagtaaagcatatacaatttcaaaaggaaataaagtttcactttctctccttgtacttaaaataatctccagtttcagaaaatagaacaaccgtttggtttgtattcatggaaacaagaagtcttttaaactttaaagggcatatttaaccttttgagcatttattgagtgcttgctatgtatggaacacttgtgttagatgttgaagataaaaattgttctacattgccgtctgtgccctgaaggagtttaatggattttccctattcaccacctgtctattacaacaccaaggttggaattgaccatgcctttctttgtgccttgtaccttgcatgaacattaaattatttgttttcatgtctgccctcaattaataatctgtatctgtcaatgaatacttattaaagaatcatttcctatccaaagatatgagcaaatgcaaaaggcccagggagggaaggagcttggtatatggagaaacatatagtaggccagtgtgactaagacttggggaattaattcattgagatgaggtcaaagttaacggggccaggtcacatggaacaaagtttctgaacttcagcattattgacagttggaaatttttttgttggtggtagctttcctgtgcattgtaggctgtttatcagcatttctagtctctggccagtagaggcatttacaccctccagctgtgacaaccaaaaatgtcttcaggcattgccaaacgtcccttgggagtggagatgagagcaaaatagttctgggaggaggctctgatgtagaaacttaaagataattttgcagcgtttagtttttcattctaagtgaaacaggaatcactttaaacagggaagtggcatataatgatttcgatttttaaaaaagattcattcgtgaggagagtgggttgtcagggacaagagaaaaacagggacgtttgtggtgagagcagcattgagggctgagggttggttgctggatggtgtgaaggaagaaggggaatttgcatggagcactgaaaggagagaatggctttaagcaaatgtcaaggagtagaagcagaatcccaattcaaagagtggcacataggaaagtgcaggagcacagaatatgcaaggcacatttagggatttgtagagtttctggaatccctgagggcctcctcagagttttagatgcaggagcatggaaagggaggctttgtattgctcggccttctcagctgcctgtggcctcccctattcagcgatatccagcttgggcttgatggggtcagaactgcatttgaaacactcagtctggcagcagtgaggatggatgggggaggaacaagagtggaggtgggtggggggagctgagtggaaagggaaggtgggtgggaagaggctgctgcataatccaggagagaaaggatgagaatctgaaaaaggtaatggcagtggggaggaggagtacagaacagataaaaagtttcatatgttatttttgaaaaatactgttttccatatttcttgcagtattctttatataaaaaggaccagtatttgaatattatttttattccattcaaatctagtcattcagatacttttaactcaaagggacatcttagaagtggcttgtttttatgcatatataggtggttttgcagaaacaacttctctgacataaccatttgcattcttgggtctcatggcaatagtttggggcaacatgaatttgaagcatagcttttaccattctgttcaacaaatgtgtctccagagtttaatgtttgtcggacactgtactagacatggtaagccttacatgttgaaatttggcaaaataaatttatcacttttttatctttgaccttgttctccataaactctccccagtgttgttcctttagtttaaactgcatcttctcaaacctggattataacagtgttgtcgtgtctgtcctctgcctctaatcttgaccactcccaatataccgtttatagtcccaacagagccatccttctaaatagaaatctgattatatcacttgcctgcctaaaacccttcagtgacttcctattgctcttgtgataaaaaattccaaagcctttagcaaaacataaaagttcttaacttctctagcctaattttctacctcccccatcttctcctgtgcaccaaatctatttcattttctcagaatggcaacttgctttacatagtttttcacgtacttcttatctctgagctggttatggctcatattttagaactcaacctaaatactacccccatgcaaaccatccctgactttgcgctaagttgggtacccctcctggatgctttcttagcaccctgaattcacccctactgtaggcctttaacactgtggttttataaacacctgttgttttgaccagctctaccattccagtaaaccactggagggaaggactgtgtattatttataactttacctccagggtctagcagagtgccattgaatgagcgaattagcatttattcatttatccatcaaacatttatctatagtatccattctgtggtacgcactgtgccaagtgctagtttggtggtgaacaaaaacatacatggttcctgtcctcatggaactgtgagagagagaggcacaattcacataattatgcacaatgtgacaccgcaaatgtggctgatgttgtgaaggagaaggagatggtatgttgagagggagttccctaatgtgatggcacttatattgagacctaaaatgttagcaagaattagctaaatgaggctgggtgggaagactattttggacacccagagaaatcagtgtgtatgcataggccttacaaaaggaggtacctggtgagaaccagtgattgaaataatcctgtgtggctgcaatgagagagttgaggctggagaagaggtagaggcagaccaggtagggccttcaggtcacattggtgattttcccttccccttaagaacaaaaagaagtccagtgtggctgaggagatggaagactttttgaaagcagtgatgtcaagggaaacagagtacttatctatctgtaattattttatcccagaacctttgtttattctgatggttatatatagttacctttatagtccatcatctaaaatcttcatttcaccctctttcatatgggcctttttgctagtcttggacatatgtaactcaaacttgttttagtggaaatagatccagaaagcatcgagatgatgcagggtaacatgggtgacttttttttacataagctattcttttgacccattcatctggctagtgtccacatccttagattactacaggttttttggtaacaagatttgtggattcttctcattattaccctgctggtacttctaatatggacttcagtgatttagtctaaagagggcataaaaattctgtgatgtctctactgtttttctccttttttacctccccacaaatgtttctcatgtctgtgaatttacaataaagtgttacatttttttcatggctaaacaagagtttataattgccagtaaggggagtatatgcatgctatttttccttttctaaaaataaacatttattgagaatcagctgtgcatcatgcactctgctaaggtattcagaatacagagaaaaaaagatacagtccggtcctcatattacttacagtctaatgtcaaagacagatgaatacatacataatttcagaattagtgtgacgagtgttgtgatagaggaagtcataaaatgcaaagcagggaaacataaaggaggagaactaacctaacttgacttacttatctcacctaggttgaggaaggaaaaccaaccagaaaaggtgagggttaatttaagccttaaggatacataggactgagcgagagaaagaacaaaggaagagtagaggttattccgggtagaagaggctatgttggcaaagacacagaaagcatcagtgaaagaaacacatatgaggcattgcaggtggttgaaagtggtggtggcacaggatccaagcatgagagagattaaagatgaggctgcagatgtgaacagaggccagatcatgaatgaaccatagtggggtcttagacacacaaatagggaggagggagaaaattctgtaggctccaccttaaggtatagccagaacccaaccgcttcttaccatcttcactgccaccactctggttctaatcatcacagtttcttccaatggttatttagtcttactatcttttccctattcgcctaacacagcagccagtgtgtttagaacataagcaaaccatgactctcctccatttcaaaccctccagtggtttcccattatactcattctacaagcctaggttctgatagttctccgtagtacttattactaggtgagaagctgcatattttatttatttatggtattcattgttgtctccctcagtagaatggagactccatgagggcaagattttttttgtctgttttattcacagatgtgtcaccagcatggtactaagttggcagtcaatactcattgaaagaatgaatgactgaaatctcagatatatcatggtattcacctcactagtcattattgaacaaatttatttcagctcatcccacctctgccctcctttcctctgccttacaccactctcaattcaaactattatgccttcctgaaaagaactggttttatgaatgtatattaacctatatctattcataatcccaagtagatttttgttcttagccaagcctggactaggtgaatacatgcttttctttcttgtactagctcccttgcctgtgatgagttctcagaacatgattagatccatgtgcgtgagccaggggtgaaatcttggcatttcagtgagaggagagcagtgttgtgacgaactgtaacaagatctgaatgataacagtcaccaggttcctagtgtaaatcacatcctcattttttaaaaccaacctctttattccttggattggtcatactctggctcttggcactgctgcttccctgctgtgaaaatggactgctctattttctcaggctccataggggtatcaagtatttgatttcttcataaatagagcaaagaaatagaaccatagaataacattgcggacacatttaacaatatttatttaatgagtaaaaaagctagatcttttgttacattgtctgctcttccagtcagtaaatgttattgtgaccattgggcaatgtttgaaatcggcctattctgattaagggagtgtttattacgttaatggtgatatataatagattgttaaacatttactttcacatattatgaaagctgagaaatggcctacataccttctcaatcttgctttcggatccttacataagttgagtactgtctagatgaacagcatactactcagcgctgtccagtagagaaggcagggtgcctgctttcaaggtgcttattatgtttatcttaacaaaaacaaccagtaccactactgccgctatcaccatttattaagcacctatgacattaacaactacagtttaaattgctacaagatgctttgcctgtgttacttcattgaatggtcttaagtcctctatggagtgggcatatatatctccattgttctgattagaaaattgtatacagataggttaggaataaacaaataataagtgtatctttgacttaagtcttaaacagttattcaacactatagtacagaaggtctctaccatagcagctataagatgcagctgtgtgtttaattgctagggggaataatacaaagaagataaagtcccctctttcaaggagtttaacttaccaagcaaagcaagtcagtttcctttggtcatcttaattcccctctggaaatatgactagatagcgaatatgagtcttttcttcacatggttttgttatctctttctacagaaaggagcagggtatcacttggatctcttttgggtggccatcctcatggttatatgctccctcatggctcttccgtggtatgtagctgctacggtcatctccattgctcacatcgacagtttgaagatggagacagagacttctgcacctggagaacaaccaaagtttctaggagtgaggtgtgttaactcagaggaaaatggctcccgaaaacacactgtgcacacatctatgtggcaatcataaggatatgggcagatttggaggagacagggcttgtgatgattaatttattcctatattttttgttccagaaaggactaaattttcatcagaggtttcagtgatttttttagtttactcctcatgatatatcattttcatggatttccaaaaggctaaatgttgcaatataaaactacaaccagattactttttttcaacatgcaggtgattttggtgctgcagtgtttactgtatcacagtcatatgtgaaggccctaaaactcttgagtctgcttatgacttttaagattctgtaatgggaaaggtattcttattttccaattcattttctgtccccataaacactgagaaactttaacctccagacgttcaatttgggtagctgtgaagggcaggagtagaaggtttttatactctgttgagcactttttacagcaaactctgctcataagtgcttgggtagagagctcacatgacagagccatcgtttcccacggcaaaacagtgggtgattcttttttggggtggggagggggtgtaggatgggaattatatttgttgaaaagtacttttgttgttgtagatttggaaattagactgatgtgatttattgtgctaatgaaatttccttgagctgtttgttaattggaatatgggacaatgtaatatctgtctcctatgaaagaaggtgtaagggtaattacacaagaggataaattgctttaaaaaataaggtcttcaaagagtccagtaattgatggaccaagagcaagtgatttttctttcttgattccaaaaggagcaaaaaatttagcaggattacttctttcttcgtgaattcaaatcacatattgcagtcactttaagagatttttttatagttacgttgggtttatacgctatccttgaggtattatttacatgatatcaacacctttgttgttttagccaaacattgattttgtcaatgtgtagtttttttgaaggtgaaaagacaagagcatgtttatgaagacaagaggtagattggtaatcttttgatttggtttcagggaacaaagagtcactggaacccttgtgtttattctgactggtctgtcagtctttatggctcccatcttgaaggtaaatatgtgaaacattcacctcttccttctcagaacactgacatataattggacatgtgaagagtgaaattcctcatgagatatttgcgagattctcatcagttctgtaacacactgaagcaggggtcaagtagaaagagagctttaaatagcttttgtcttgatttccttctcactctttcatcccctcccttatccttagttttgcagttatttgattgaactatattaaattaacaatatccaaactttctgatctgtgaaaatagtagtttcatgcaattgaatcagactgatcttctccccctcctccacacacacattttttattctccttgtcttttatacattctttcttctatcaccttccatttgcttgtatccaaatcttgtccctcttccctcattaggctcctaaataacatgagtgatgcaggataaccattttgatatttttcgactattcttaattattactttgtttctattttatttgaatcagatggccttataattcacaaaggtaaattagagtaaaattactgactcataattagaaagctttagaaatgaacttttgaagaagaaaaattatatgatattggttgtttagaaaattaggggtcaatatataggtttattgatgggttggatatctgcctagatagataaatgcaaactgtatgtgacaacctattaagaagtaaactaaaactaaaaactaaagaaagttagtgtatacctcttcatgaagtttccaattttcttttatgatgcaaacattttatttttttcaatcatataaacatgcttgcgaattattgatagtttgtatcttatgctttatactacagtacaaagcatgcaattcacccatggacctaacagctataaacaaccactgttaacgatatccttccaaattttctcttacaatttttatttttaaacattttaattttaaaggcttttaaaatgctcatataattacataagtaatggggcagtacaatcttctgaagaattcaaacaatatagaagtacacatagtgaaaagcaaaagccctctgttcatctaaagttagcaaattttatgtcagttgccaatcagatgaaattgaggaaagtggaactgtaatatctttgatctgtaaataagactaagattgccttcagggtatttagactgatgtatacagtatgcacaaaatacttgttaaacagttaaaatatgtaattattcatcttttttccttggtttccacaatgtcaatgaactggtttaattaatttctgactggattcatgaggaaatatgtatctcatcttagacaagacattaagattaaaaataacctcagaaaagttgtttctgactatgtacagagggctgtaaaagagtacagagcttatgttctgcagggacagagggaaaccttttgtcacctttgccagtgcaaagcaagttatgggataagtgtgaagatgtggtgactttcacagcattgaatctgctgccaaatgctttatgttcttccgttatcctataggcaccagcacatcagctggtggaaagcctaatgacagtgttaccttttaggcaatggaacctcatccagtgagatcatttttagagagttcactgcagacaattatgagcccatgttgtgagaagctctcctggaaatgaattttccctgtgggttccttgaaggtgggctcacttcaagtaggtgcagagtttcttttatgagctctctttgtgctcagtcactagtgagggataaatgggcagaatcttttcatcagttctaatttactcatcgcctcccccatttttcttttatttttatattatttcttttcattaatacagtataaaatcctaattcaaaaaagtcagatgtgtttaaaagttccttttgtgtgtatatgttacagcaaattggctttattcctagagaatctgacagttgagtaatcatggatgattccaaggggacacagagaatagatactgtataattactatttttaggagagatgcaagacttacattttcaacaacgcctcttcctaactattttctcaccctgcacccaaatatggctgcagaggagttaaagctgaaagttcttttgttctttacaatgattcttttcacccctgataggcaaagtgccttagtatttacagaaacagattagaatgagagaaagaaggcagagagctgtaagagatcagtgagcatgagctttctttccctttgaccttccttaattgatccatacctgggctcatcctcattcagctgctagtgttcatgattgtggctatttccacctggcaattttgagttaccccaagtagtcattgtaagaataaatgaaaaatgcagtccagcaaacgtttttgttaaggttttccccaaaatgtgggaaatggaattgttttggcaatatagtttatagcatactgtacacaacctatatttaaaaacaacaagaataaaacagtcaaggattcgcagttgtgattctttacttcagtaagttaggctattccttacttcgggaatcacaactcctgataaagtcagctactttcagattatgtaccattgaggtttggtaagttaagtgcgtttatcacaaatcccttgttagctcatttgaaaagtcaatacaggaagaagcagatattgagggtacagtttaactaaaacctaagttatgactaagtaagagtcaagattaacaattaaccttagaattcacaaagaaagtggtgtcaggggttatgttggagtaggaaaccttttttcctcccctttgtgactatgtgtttttttagagaaccagaggacaacttaagagaatcattttacttaagagtctgtctttgaaagggcagatcaaatgaatgggaaaagagaaatgtgttacttttactttttaaaatgaaatggctcaacaccatttctgcaaactccatatatccctcacaagtttaatggtctcagatgatcctagtaattttctttcatgcattaagcagtgtaggaagttgtttctcctgcctgtttatgcaagcttactttgaaaatgaagtttttcatttttattctgatctctttgctgaggtccgtcttttatgtggaagaatgtaaggaattacagttttaagttcacgaggataccccttgaccctagccagcaacagtcatacatgcctcaaagcactgaatctaaccactgattcggtactgaactgttgggaagcaagaataactggcgcccctggctggttaaacagcttagttctgtgtttctgcagcagaaatactgcctggtaagtgagtattctgtatggggaaactagaggaggctaaagagcatcaaaaagatgaaaggcacttccttgagcttacttttaccatttttctggcaagtctgaagaaataaaaatcaagtgaagttcactgctacttttgttgcctttgcttgaaatagtttaattcaagttaattaggagtagtcaaatttatctttaagatttgtttagtgttctaaaatcaggatagcatttaatttgtatttggaaaatatttgttgagcttctacaatatgccacaatatgtcactttgttcagtgccagggaaagcaaaatggtagagatgatggtaatggtgatgatgatgatgatagtagtagctaccatttattgagctcggcatttgattaagggctcaacacagatttttaaaatttagtccttcaatgaatgacacctacaaaaaattgtctctcttttacacataagaaaatttattaatgacttaccaggttacaaagttcgtaaataatagagtcaaaatgtgaattcaggcagttctgacatgaaagccaatctcataaccctcagggtttacaaccatttaaaacaaaacatagtacttgctctcaaagaactcattcactttcattttccatgagatgatcttctccagcttctttgatccaacttccagtcctttcatgtgcagataaatacagcattttcacaaactcctcatcatacctcattccagtttcttcaatgactaggaaccagattgcaagtcagtacttccttatcagcttagattttcaagatttaagggaattaggatattatttgaataacatgtttctgaatatagttgttactgctgaaagggcaatatagtagaacttaaataagaccagggctttgaatctgacctttgcagccattcttctggtctgtactcctgccattttccaccctgaccactgaggaccaaggagagttctgctgggcaattgcagcaggcttcttgacttgccagtcaggtcttcatgataattatgacattaatacctcatttatcatttattatctattcagaatgaggccctggactagatattttatgtgatatactctttatcataccctcttttaaatgagaatactgaggataagaaaagttagtaatttctcaatgttacataagtagtagggccagaatttgaaactaggcctgtctgacttttgtgcccatgctcttaatcaggatctcgttctggattgtacattcacatgtacacacacacacacatacacacacacatacacacacacacatacagtgacgattattctgctagaaggtctcactgctgtactgaattctggttggacaactacactctacccttatttttaaatttacccttttctcgtttactcttctgggaatattcaaatactatcagcacatcaaagggaggtataagtgaaaaagagtagaactgcattcaccagaatttgaaaaatttggtgacatggtctgagtatgttaactcctattttgattttatctcaattattccatctgcttgtagggtcaatacttgatttcatgtatggtaatcttatttataattatacttttgtgctttctgggtatgattggttatccataaaatttcctttacataattttatcatttggcaattcttgatatgcctgtatggtatactttgtgctgtttatgttttaattactcctgtcttgctttgtaaaaatatctacctactattactatgtaaattatactggtttaacttaagatggagttccatcttcttaaaatgcatcttctctttcctcctttgagaaatttctattgcaagaaatgattattttgtgatgaatttttaaggattgacctcctgtgacccatgaactaaatccaataaaaagtatcctctaacccaataattctgtcaagtttcatcaagttttccatattggaagatttttattgagatgttgcattatcataaggaaaatggcaaatttcaaaagacatatttttatcacattgaagttggcccaaagtcaacttaatagccttctttatatgtattatttccttttcaacaaagaataactgtttaaaaaacatcttcatatctaaagctatttttctacccacaacccatgccattctatgttactgataccttctgattttattttgtggtagatttggtgatatctgtaataataaattcacagagaatggaactaagcaccaaggcaaaagtgtccttcactttgacattagaaccacattagaaaaaacatttagctaagcctagctgagggatgaggatgaggccagggatggtccctttgtggtggctttctttcaagcaagaaaaatgctttacccagattaaaaaggaactactgcaggaattctaactagttttccatggttgaactatacttctcttttcccttcttacttttctttccttccagctgccccacccccaccacccaccaaattgaaaatgaaatgacaagaaagaaatatgggagatgtttaaaaaatgaatcaaagctatgcaatgatccttctcttagtttttttactttatggtacatttatacacaagaatcacaaggaatagaaacatgcacattgcaaaataaatgaaggcatgtgtcagaaataaagaggcttgagtgtgatgtgttcacctctttgtggtgactgttaggtattacagcttccccagcaggaacatcatccctcctacccccgtcaacattctatgtcacttttagttttttctgacatcaagagcaaaattagctacattaaaattgttagtctttttttgaagaagcatttgatgttttgtatatataaataaggatatttatttcatataaatttaagcatccctatggctagccaataaaaattggaaatatttgttacacattttagaatttactcattctctaatagtggccaaagagtctcagatatggaactactttaggcaatcacaaggagaggctgatagaaattgtgcttcacttagtacgtgcagtatttttaaaattactctaaagccatactatgttttctggttacaatagcctcctttatgtggatttggtaagattggccttaattgacttgcggttttagtattttagctttgaaaaatcctgaaattacttgaacttcttttcaaattctaaggttgagaaccttttgtttttcaaacagaagacttcccagaaacagaatcatccttgatttgcttagtttcctcagtactagggacatttcaaaggtctaggaatagatacagtttacagacatcacttctccttgttaaaacactttgtattaatataaaatattttttgctaatgcatgaaaaggtattaattcagttttaaaagatgtgtattaatccatgtgtgtaattaattgcttccaagtgctccaaggtcctttcaagcagttctctttagttagttctcataatatttgcaagaagcgaggggatagtcttttgatgtttattttattgaaagaggcatctatataccaagctgatagactatttggcaaaaattattaaggacaaaaatgaacagactatattgaaaggaacttgatctcaagagtgaggcaaccatctattaatacctctgtttctgtctacctcacagtccatagaagcatcttgtttacatagttattccttttcagggtgaagggaaacataacttttcctccattaattaaaaaaaagttattagtaaggtcatgcatgctcactaaaaaaacaagcatccaatgaaaattgaaagtccattatacccttcttcatttatttctattacaaagagtttagaagttcatcaattgactagtaaagcatactagttagaggtcactaagttattatatcctatattttagttttagatttagcctttatttaaatgattcctcttcattcctcttttttcttgttatcatttttaagttgtatccatttttttccttctagtttatacccatgcctgtactctatggtgtgttcctgtatatgggagtagcatcccttaatggtgtgcaggtaagtttttgaatagcaatgtaagtacagtagtgtttttctagtagtaagaatagtccagtaacagatctttgaagaaaagtgctaatcattattaactgctgagtttttaaaatgcatttattttctacttcaccattcacctgcttttcatttctggtttaatcaacaagttagccagtattaagaaaagttgccatacatacccattgtttaaataggctgttaaaagtcatttaaccaagaaagcaagaggctataatctttcttttccttccccttacccatctttatctcctttttactgtctcaggaaggatacctaactctttctgtgtgttcttaaagatagtgtttatccatttgccttaactctatactaaaaacaggctattgatttgcttttcacatggctatgatcaataatcaaaagtttttttaccaataaaagaataaagtcaatgtggttgatgtattgcttttgttgaaaacttcagctattcataactttgggaaaactgacacacttttaataaaatcattatcaactgggcatggtggtgcacacttttaatctcagctacttgggaggctgaggtgaaaggttcacttgaacctgagttttagtccagcctcaacaacatagtgagaccctgtctctttaaaaaaaccaaatcattagggagaactttgtaagggactttgtctttcaattgggttttaattaaattggcaccaggaaactggaagtacttatgctgttttctggcaccttgttaactgtagccttatttagcacttagtaatattttaatgggaaaagactgcatgtcctgtgaacatcataagaatttatttgaaccccttcaaaatagtccttgcttttgcttattgaattcagattaatttggttttaaagtcagatagaactgggcaagtggccagactaccaaaaagagaaaaggctactttacttttctctgtttaggtctgctgagtagagttcgtcatcttttggatatttgttacaaaatacaaggtggttcttcatagagtggactagatgaatgtgagtttatttgtgctcatgaaacttttgggaagcataaatctgtaaaaatattttatttttacctgccattgtaaatattctttatttcccaaaatggaaaaatgtgaaacagaaatggcccacagacaaatagttcttatttttatttgctcttaattacctggtctagatcagaagtttaattctatgtgttttaggggctttattggttgaaactcagtgcatgtttatttaattaaaaagaagaaaaaatcaaccacataataatgatggggaaaaacaaccagggtccagctagtagatttcttaaattctgcaatgctattgcccctaatggcttttctctttctttctttctcgattctcccttgtttagacctttttggtaagatttcatttagaaaattttgtaatttgtaaagaaattttgtaacccaaactttataaatgagaaggtcctcaccagtcaaaaatagttctagagggaaaaagaaaaccctttaagtaggaaatcactagagaagattgtgatggtctaatttacttttgcacttctttccctccagaaagaaaatagagatattatttcagagttcatattgcatgattattcaattcaatagctatttactgagcatctttcattgaaagatcctgtgataggttcttgaatatcttcccattcgtcactggcaaggtcaattcggcagttattctttgaagcacagcacctgacacacagatgctcagtagttatttcaatagctgtttatacatcaccatacgatagcatcccttagattcagatgttgaccctgaaactcactgtagtattcatatggcttttctctgaaaagaaatggtgatagattgctgagtgtattagtcaaagtatgccactcagataagtaatatggaatttatgaaaacataatgtattcccatttttaagttggatacttcctttatatccttaaaacattctggaaatgtattaatatatgatgcatagtgtcatctcctctttgttcagataagacaactgaggcagagtaagatacatgagctagacatcttccttcagcatattagtactaaaataggcaaaagatccactttcctgagactcagagagtaaaaatagaaattaggagatgagctcctagaattttttttctttgtgaccttattctttagtggccactttttcttatacatctacataacattcccgcaatataataataaagatttgaagacttgtgctttagtgtgcttgactaaatttctgcattccttgaccattcctttgtcctctgaaaaggacactgcttgcctaaattatagaatataaatcagtagtgattagttaggcatagtggaaatgtaatgcagtaatgcagttggactcctttcctctttcctccccagttcatggatcgtctgaagctgcttctgatgcctctgaagcatcagcctgacttcatctacctgcgtcatgttcctctgcgcagagtccacctgttcactttcctgcaggtgttgtgtctggccctgctttggatcctcaagtcaacggtggctgctatcatttttccagtaatggtagggattcctttaattgaacgtacctgtgagattatatgagtatcatgtggttattgttatatggaagacacacatgtcttttatgtgttgttccaaatttttccagctttgacctcatcactttgatcagttgtaatttacatttcccatgtttatggttgtctaggatggaccttagaatcaggctcacctaagttcagatactggccctcgttcatgctcagcagtaaacttctttgaactactattacctcatcagtaaaatgggagttgcattgttgtttttctgagcatcaaaaattaatatcaagcatgtagcacaatgcctgacacatagtagacaccagtgcatgttaattactttttaaatgttgtataatagaattaatctaagtaagagtgtaggacatttcagttcaagtaataaagaagtgcttggcaacttgtgagaactcatccagtacattagaggaaatggagtgagaagttcactttttacatttcttgtggtttgcataatggtaagtttaaagataaggtgggactctctatccttgtcatagtatgatgagaaacaaggtaaagcaactaacgtttcactctgagtcacaagtgaaagaagagaaaaaggagttctgtatttggcatcactactgaattttatactttaccataactctttacttcttgcaagaaaatgcatatatgtacacttaaaacaagtcacaaagggagcctcaaatctgttttatctcccccacagctttgaaaacagaattttcctacacttaccacattttatttttataagaatcctcttactcttagccagtattattattttatttttcatatttgttgtttgaaatttttttcgtccaaggatgcaagaaaaaatggatattaaatactagtgatatttgttaggtcagatttttttcttaatggtggcttatgtctttctttcctttttttaaaaaaaaactatattaacttactgaaaagcacactgagtatgagaaacactcaaatatacctattagtgttatctgcctacctacaaattttgctgaaaccaagaaaattgaagctagaccaggatacatttgaattatatccaataaatcactttttgcttgtgctaaataataattttaaaatggtttacttttccaaagtgtttttgtcttttcagaacttttatttggtcacaaaataattctgtaatagaagttaggacagatgttatttatttctctaggtgatgaggaaactgtcatatagagagcacgatgctgataaagacaactgcttaatttgaagcaagtcaggatgcctataacttgctgcatattaattttaatatagaataaagatatctttaatgtaccttcagaagttattcttcaagagcaattcatagaaccaaaaatacacaggtcaagaatatttgttttggaagcagacaactgggaccctttgtattattcagttatctgggttcatctccctcacagacattaaggaccttggacaacatacttaatgtctctaaccttcaatttcctcagctgtatgataaaaataataatacctattttgggggtttgttctgaagaataaatgagataatattgcctgagagtttaacataatgtctgggacatgttaaatattcagttaacggtggtgattgaagtagcccagtgaatgaaatggtctatgcatattcaaatactacctcattgtgaatactttgaagatgtcttagtgttatatgtgtcgtacagattttcttgattgctaaaaacctttatgatgttttaatttttaatacttagaaatcatatgccagctatttttttactttaaacttttaattattttatttaaaatctcacatggaaggcaatggttttgaaaaacaatcttttcacattaaaattctaattgaatgtgatcatgcattttggtgaacaaaacaaagtgagtttcaactaagacttttataaaacaactttccccatgtagaaaattatgagagttcactcggtataagtccataccgtcaagatcaggtctgtcatactctatctagccttacacaaagtaggtttctgtggtctttgataggagagtatctatgcttgctgtgacttcatctgacatggtttctttcatacttttaatatttgctctttcagatcttggcacttgtagctgtcagaaaaggcatggactacctcttctcccagcacgacctcagcttcctggatgatgtcattccagaaaaggacaagaaaaagaaggaggatgagaagaaaaagaaaaagaagaagggaagtctggacagtgacaatgatgatgtaaggaactttccaaattccaaaggaaagctagttaaagaaacaaatgtgaaaattgtccctttttatacctgatgtgaaatggagggctgagttctaagaatgtttatctggacatgtggtgtattactcatttcacctccctttgccctttatattctctggttttttatgttttctgaattctttctgtaaccattaatacactaataatgacataatgactaataatgacttctaaaaaatttaaaaacccaccacattaaaaaaattctgatctcatagatataaaggaagtttgcttagtaatgctataaaatgtatttggtttctattaataacccagggcttatatttgagataataactcaattttatgtaattttaagcctaatgtggatagatgtcaatgatctcacttcacgtgatctgtgaatctatttgagtaggctctccaccaaagttctatgctgttatattaatattagcattatatttatactgatatgattcagcattatttttctgtagttcttcaataaaaagaaaagggaatgggagtttggggtctttttacataattatagtggttagtgtcatagtccagagggtcctcctccaattaggtgattaagttgagaagtaaaattgttgcccagttttttctttaggagaccagctcacagaaatacagattctccagcagggatctgtaatcagtactaggaggaaaactgggatttgtttactttaacacatgcggacaccttattccagtagccttttgaaaagattgccaaaataatgttttccatttgaaaatttgctctggattttacacagtgcagtatcacaaatgattttttgtgcctcattacccattctaaagtaggaatattgttaattgttagtttctacttagtacttgataactttgattgatcattgcatactttatccttaattgtctcaatagcttgttatcacattatttatttttgttcccattttacagatgaggagatttagactgagaaatgttaaatatgttttagaaattttaaagctttattgaggtacgattgacaaataaaattgtatatatgtaaggtgatgctttgacatatataagtcatttttctaattgtacacagccatagtggcaaggccaaaactcaaatccaggcctctctggttatttctaactggtcaggctatctgattgtattctttttgtagaacttggaaatagtacagtgaaagaaggcaagagacagaattggatttcacataaattgattcaataagaaaaaggcttaatgcatgaggcacatttagctaaagagaaaaagaggtgaaaagagctttatgtctgtcatcatccatctgcaatgagaacaggtatatagattttgtttccaatgatgacagaaaaagaatgtgtttaaactacagaagagactaagacgtaatagtccgaagaacgatgtgtttacacatttaatagaaattaaaatttgaaatgaatttctggaccactcaagaccaaaaaaataaaaggctgcctgaaatattaaaataattaaagcagtattttgtccaaaataaatatgtcaacttatgtacctggacatcaaatttaaagttcattacacattatgagtgtgtgaagtcggggattatggaatccccctctgtaatgatttttgagaaaaaatagtaaaatatcagctttggagaatgttttaaatgtactgctctctagtgacaaaagttggatcaaaagaactccttagaagttcttccaattcttagatatgatttccaacaaatcctatttcatttaaagtgtttttttgtattaatatttaccatgttcaactctgtgtttccaacagatttcttgaagccaaagtgtcgtacttgttttttacctcttcctcttcatcctaccctttccaaaacaaacaaacaaataaacatatacattggttcctaggcagtgaatccagctaggcaatttagagtacgtctgtgcagtatgttctgtgtgttgaactcattatttaggggctccacattacaaatgtggttctcctaagtttactttttagtcatagggtttggggcccatggatatagggagtcatgcggggacatgagggttacagctataatataatatttatgagcacaattagtgaaaattatagctcttcttgttacattgatccctttaccattatgtaatgcccttctttgtcttttttgatctttgttggtttaaaatttgttttatcagagagtaggattgcaaccactgcttttttttttctttccatttgcttggtaaatatttctccatccctttattttgagcctatgtgtgtctttgcatgtgagatgggtctcctgaatacagcacaccgatgggtcttgattctatccaatttgccagtctgtgtcttttaattggggcatttagcccctttacatttaagattaatattgtttatgtgtggcatctttatttttttttcttttttgctcgttgaatgcattatcttagttctctaaaaggatactgttgttcattaacctctttagagtcataaataaaggaattttccatgtaggtaataggctttatgttaagattttattaacattaattctcattttattttcaactaaaaaccatctttttggtacttttaattaagagatatattgggtctttcagcccaaacatagacttggaatcaatataatgcatttaaaaaaaacaaagtggtaatctttgggaaatctattataatttgggctaggtggcttgttctttaagcagtcccatgattagctgcctggttttgtcatttccattatgattctctgcttatctgaccatcatagacacctttttaaacattttattttcttatgttttgcttacattttcagatatctttggcacaagctaattgaaatgaacctttatccataaaatagtacttaaagtaagagaggaaagtttattttctagtgtacatagaaggcttcttgatagtggatatataaaaagtctgtcacttgttctagaaggaaagatcggtcatgattttatctagagacggaatcagcataaacaaaacaagaatttcaagaccgtattataacctgggaagtttcctatgtttaatctgtttttgcattgagatcatttgcttcacacatacaactcataaacattgctgattgggagtctgatagaaagctttacaattcagttgtagatcgatctctattttgtgcagttatagttttaattgactcaataccattaacttagaagagtggaaaacaaatgtgagggggaaagaaggaatgcagttaaaagatggcaaactggaagtaattataaggcttttctccttagtagtatgtaaatgattatagaaaacggtttgatcgatgctaggagataggaagggctgtataataaaaacattctaaaacctcttgtacatttttttcacagtctgactgcccatactcagaaaaagttccaagtattaaaattccaatggacatcatggaacagcaacctttcctaagcgatagcaaaccttctgacagtgagtagaactaacctcttgcatgcttgcttgaatatgatttgcacttacagagaaaacactttagaatggccatctgcattaactttccctcaattttgtttttcctttttctatgagaagatttacacttaattataataaaactttgtttttacataccctaagcttcattcttccttttatccataaacttttaaatttttatttggtagtcttttctcttacccaaatcatccccagtttttccaatggctaaattaataaccatgtttttaattgatttttctttttttttctgttggtattgagaattgcagcttataatactacatcactgtcactgtttgtcttccttaggttttaactagtgatcaaatcagctcaaaagagaaattgcatcattggtctctcagtgatcaataaatcaattgttaatattgagaatttggaaaaatttaattttgattaaattagcaatcatgaagtattagtacaactttctagatataacttatatgcatttgctttctaatctcttcattctcccttttgctatttcaaaattattattataactgcactgatctttctagggtgatagcctggtgactacggtgcaatggtttgtgacatttttctcttctgtaattgaattaacaggccacttagtaatattagtgaccatttcagactttcccaatagcaggtagcaattgccatcaagctactttctactttgcgttctcattgaagaaaatgcatccttttagattcagatgcacttcagagtacactgatctgttacagaaaaagacagttaagacacttttatttctattttaccatgccacctcaactacaataagaggttactgctatcaagaaaagtttggaatgaatatctattgataaaaaataatgggtatattagttatcaatcattgagtaacaaattacaataaaactcagcagcttaaaagaacaaacatgttttcttacacaattcctcacattcaggaatgcaggggcagctgattttggttctggctcagagtctctcatgagattgccgtcagagctgtcaagctgtcagctggggctgagtctctgaagactattttttttttttccaggaagaaatgaaaggatgatttgaaaattatagtatactccacagtgtgggagtgggcccaagaatagggactcaagggccccattacaaaatttttgggagtttaaataccctctacttggggtacgccctatgtaaatggagaggatgaagtaaagttacaaactcatttatttggcccacgccccatggagaggatatttcctgtcatagccgaagtgtgaattggccttatgttccctgcctccagacactgttttcctgccacatctcctcactgagagatgtgatctccatacatcttcatgggaggcagagggaccgatggtcttttttctgtaactgcttcatgctggcttggggcatactcctacctattggggatccctgaactctcaccctgctctgtctagtggaggcagggtagcttcttgatggccagggtgttgtcttcacctggaactggctggaacctttgttgtgtgatcatctgaagctgatggtctctaggcaagaggaaatgaatttggttaaaaaggggaaatttttttaaacaaaagtctgggaagccattgttttgaactaagctcatgcactgggccccaacagaccaaaccaaagcaaaatgaagtcatttgtgctaagactgtaaggaaacacgtgaattctagaacagagcaggttttgtttcttcttctgcaaatctctgtaacaaacattcttgacagcataggtatccaccccctgaggttcccattaaatattttagtgtctgaagctgggtgtctgcttccaaaagcatactcatggggcccttgggatgacctttgttttttacctgtgggtatctccgtagggctccccatgatatggcctccctcagagccagtgataaaagagaaagaaaccaagacagaagctgcagtcttttataactaaatctcagaagtaacggaccattacttctgtcatattctggtggttatgcagccccacactgttaacactgggaaggaattacacaaagtcataaataccaggagacaggatcactgagagccatcttggaggctggctaccagcctggatttgaagaacaaagaactaaagcagtcttacctttggtgtccagtttgtaacctataacttgtaaccgaggctaatttctgctaacccctattaatggggtttggttatgaatttctttttgagtttaaactcctcaaaccatgttctgacttcatttttctccatggagcattaatagcaaaagcacagtctaacagacatgtgcctagcatgtatgtcttctgttggcatcataacctggtatagccccttataaagaaatgtaaaagctattttttaaaaaaattactagccagaatttgaggctcatggaaaaagtttatgtgccatttgcccttcatcctctcaaaaccccttttaaaggataaattgcaagttgatatgatattagaagtttacttaaacaaaatacacttgagcattttgcctgaaatgtttcctaatgtcatgtttatctttataatccatgatgaaagaacaaaactgatagaagtagtgttgcagtatgagtaagtgcctcaaaaaaaaaaatctttttttccttatgaacaacagcaggcaaacctaggaatactgaagatggaaggaaatccaaaagcaagccttaggcattaagagaatgctatcaccctctaaaaatgatttgcttcttatccttctcactgacaagacaacagtgatccatcccagaaaacctaaagtaaaagagatgaagtgattttgtcttcatcacactagagtcttagcttaataccttgtttattgaaatgcctaaacttgtcttttttactcttaccagttatggaagatgcatcaattttgtgaagatttttgttttatacttcaccaaagatctaccatttatgtttttaaaaaattttattttccaggagaaagatcaccaacattccttgaacgccacacatcatgctgataaaattcctttccttcagtcactcggtatgccaaggtaaaggagagcccagtattttatgtttttctgtgggataattgccccacagaaatgtagttaatggtgggttattgacagaacttcttgttctccttcgtctctattatttatcttaaataaattacccagtgaccaaaacttgttccagcttttactagtagaaagcattctaagagacctagttactattacaaataatggaatctttcagtatcattaagttacaacccaggatcaacattagctcttttaatttcagtatcgtccctgatttaaagaggtaactggcactttctgacagttcttctccagtggtttctttccctcttaatgaagttctagggatttcagattctacttgattttctgaaatctctgaatgtttttattatgtcagtctttttgtcctttaatttctgacagcattacccacctggtagtacctcttttccttttgtgtttgttgtttttattaatttaatctaggtatgagatcttatgaatttttttacttgaatttcttgactctgctggtaaccttcatcccatttaaaatgtttgtttttaatacacaaagagaatataaatattaaaagagaacaaagaaggacacatttgacttctatacaatgcataaacatttgacagatgatgaaggaaatctgatttacttactacttttttttttcctttttctctagtcctcctagaactccagtaaaagttgtgcctcaaattagaatagaacttgaacctgaagacaatgattatttctggaggagcaagggaacagaaactacattgtaacctgtttgtctttcttaaaactgacatttgttgttaatgtcatttgtttttgtttggctgtttgtttattttttaacttttatttcgtctcagtttttggtcacaggccaaataatacagcgctctctctgcttctctcttgcatagacacaatcaagacaatagtgcaccgttccttaaaaacagcatctgaggaatcccccttttgttcttaaactttcagatgtgtcctttgataaccaaattctgtcactcaagacacagacacgcacagaccctgtcctttgcctctattaagcagaggatggaagtattaaggattttgtaacaccttttatgaaaatgttgaaggaacttaaaactttagctttggagctgtgcttactggcttgtctttgtctggtagaacaaaccttgacctccagacagagtcccttctcacttatagagctctccaggactggaaaaagtgctgctattttaacttgctcttgcttgtaaatcctaatcttagagttatcaaaagaagaaaaaactgaaggtactttactccctatagagaaaccattgccatcattgtagcaagtgctggaatgtcccttttttcctatgcaactttttttaaccctttaatgaacttatctgttgagtacattgaagaatatttttcttcctagattttgttgtttaaattatggggcctaacctgccacttattttttgtcaatttttaaaacttttttttaattactgtaaagaaaatgaattttttcctgcagcaggaaacatagttttgagtagttctacctcttatttgtagctgccaggctttctgtaaaaattgtattgtatataatgtgatttttacacatacatacacacacaaatacacaatctctagggtaagccagaaggcaagatcagattaaaaacaccatgtttctaagcatccatttttccctttctttaaaagaaacttaactgttctatgaaggagattgagggagaagagacaaactcctatgtcatgagaataaccgatgttctgataatagtagcatctaggtacagatgctggttgtattaccacgtcaatgtcctatgcagtattgttagacattttctcattttgaaatatttgtgtgtttgtgtatgtgctctgtgccatggctggtgtatatatgtgcaatgttagaaggcaaaagagtgatggtaggcagagggcaaagtcattgaatctcttatgccagttttcataaaacccaaaccacatatgaaaaaatccattaagggtccaagaagtctgtccatatgaaaatgagggtaaatatagtttatttcccaggtatcagtcattataattgatataatagctctaacatgcaatataaaattcataggagtattaatagcccatttacacatctataaaatgtaatgggattgcagagctgcagagtacagtgtaacagtactctcatgcaatttttttcaggatgcaaaggcaattattctttgtaagcgggacatttagaatatatttgtgtacatattatatgtatgtatatttcaaagtaccacactgaaaattagacatttattaaccaaatttaacgtggtatttaaaggtaatatttttaatatgatacattacatattgtgaatgtatactaaaaaaacattttaaatgttaaaattataatttcagattcatataaccacaactgtgatatatcctaactataaccagttgttgaggggtatactagaagcagaatgaaaccacattttttggtttgataatatgcacttattgactcccactcattgttatgttaattaagttattattctgtctccttgtaattttgattacaaaaattttattatcctgagttagctgttacttttacagtacctgatactcctaaaacttttaacttatacaaattagtcaataatgaccccaattttttcattaaaataatagtggtgaattatatgttattgtgttaaaacctcacttgccaaattctggcttcacatttgtatttagggctatccttaaaatgatgagtctatattatctagctttctattaccctaatataaactggtataagaagactttccttttttctttatgcatggaagcatcaataaattgtttaaaaaccatgtatagtaaattcagcttaacccgtgatcttcttaagttaaaggtacttttgttttataaaagctctagataaaactttcttttctgatcatgaatcaagtatctgtggtttcatgcccctctctatacctttcaaagaactcctgaagcaacttaactcatcatttcagcctctgagtagaggtaaaacctatgtgtacttctgtttatgatccatattgatatttatgacatgaacacagaatagtaccttacatttgctaaacagacagttaatatcaaatcctttcaatattctgggaacccagggaagtttttaaaaatgtcattactttcaaaggaacagaagtagttaaccaaactaacaagcaaaacctgaggtttacctagtgacaccaaattatcggtattttaactgaatttacccattgactaagaatgaaccagatttggtggtggttttgtttctatgcaaactggacacaaattacaacagtaaatttttttataagtgcttctcccttctccatgatgtgacttccggagataaaggattcaaaagataaagacaaagtacgctcagagttgttaaccagaaagtcctggctgtggttgcagaaacactgttggaagaaaagagatgactaagtcaagtgtctgccttatcaaaagagcaaaaatgcctctggttttgtgtttgggagaaaagtatcttggacgcactgttttccttgataaaagtcatcttctctactgtgtgaaatgaatacttggaattctaattgttttgtgtgccaggggcagtaatgtccctgcctcttctcccaatcaaggttgaggagtggggctggggagaggacttaactgacttaagaagtaggaaaacaaaaacctctctcctcagccttccacctccaagagaggaggaaaaacagttgtctgctgtctgtaattcagtttgcgtgtattttatgctcatgcaccaacccatacagagtaaatcttttatcaactgtatactggtgtttaatagagaatgattgtcttccgagttttttggttccttttttaactgtgttaaagtacttgaaatgtattgactgctgactatattttaaaaacaaaatgaaataatttgagttgtattacagaggttgacattgttcagggatgggacaaagccttcttcaatccttttcatactacttaatgattttggtgcaggaacctgagattttctgatttatatttcatgatatttcacatttgctcttcacagcatgagcatgaagcccagtggcaccaaatggctgggtacaatcaagtgatattttgtagcacctcactatctgaaaggccatgagttttcagatgatttcattgagcttcattgcagcctgaaattttaaaaaagttgtgtaatacgccaaccagtcaagttgtgttttggccagagatttagatatgtccaatttcctggctcatttcattgtgctctatgggtacgtataaaaagcaagaattctgtttcctaggcaaacattgcaactcagggctaaagtcatccagtgaaacttttagagccagaagtaactttgtcccagtcctacaatgtgaaaagagtgaatagttgcctctttttagccattttcatggctggtacatattcgtacgcattacttttcagaatcaatacgcactttcagatattcttatttttattctcttaagtctttattaactttggagagagaaatgatgcatctttttattttaaatgaagtagatcaacatggtggaacaaaatgataaagaacagaaaacatttcaatatattactaataactttttccaatataaatcctaaaattcctataacatagtattttacagttttatgaagctttctattgtgacttttatggaattaagagatgaagaagatgagatattttagcatttatatttttcaaaattatatgtatacttaaaaataaagtaactttatgcattta

SEQ ID NO: 769 - DNA, 33677 bp, Homo sapiens
gaacaaaccaacatttgagccaggaataactagagaggaacaatggggttattcagaggttttgttttcctcttagttctgtgcctgctgcaccagtcaaatacttccttcattaagctgaataataatggctttgaagatattgtcattgttatagatcctagtgtgccagaagatgaaaaaataattgaacaaatagaggtaagaacaaaatggaatatctttcattaatttttagttttttactattatttttaattgacatataattgtacatatttatggcatacaaagtagtatttctatacatgtatacaatttgtaaagatcaaatcagggtaattagcatattcagcaactcaaacatttatctttgcattgtgtcgggaacattataattattctcttctagctactttgaaatacacaacagattatcagtaactttaattttcctattgtactatcaaatactagaacttattctgtctacataactgtgcttttgtacacattgacaaacttctcttcatttcctttctctcccctatcctttgcagcctctaataagtatcattctactctctatctccataagataccctggtttagttcctgcatatgcataagaatatgtggtatttatctctctgtgcctggcttatttcatttaacataatgtcctccatgctcatccatgctgccacaaatgaagcaatttcatttttttcagtgactaagtagtattcatttgtgtttatataccacactttatccattcatctcttgatggacacttaggttgacttcacatcttggccatcatgaatagtgctacaataaacatggaagtgcagactgatgtcttttcccttggatatatacccactagtggaattgctgaatcatgtggtcattctatttttagatttttgaagaacctccatactgttttccataatggctgtatcaacttacattttcaccaatggtatataataggtctctttctccacatccttgtcagcactttttttgtctttttggtaataaccattccaactgggctgagatggtgtctcattctggttttgatttgcatttccctgatgattaatgatgttgaccactttttcatatacttgttggacatttgtttgtcttcttttgagaaatgtctattcagatcatttgcccattttaaaatattattattattattactttgtctttgaggtttttgagtttcttgtatattctggataataatccattgttggatgaatagtttgcaaatatttttcccaagaattgggatgtcagccaggcacggtggctctcatgcctgtaatctgaacactttgggaggccgaggagggcagatcatgaggtcaggatttcgagaccaggctggccaacatgttgaaactccgccttcactaaaaatacaaaaaattagctgggcatggtggcacatgcctgtaatcccagctactcaggaggctgaggcaggagaattgcttgaacccgggaggcagaggttgcagtgagctgagatcacgccattgcactccagcctgggcaacagagcaagactccctctctggaaaaaaaaaaaaaaaaaaaaaagaattgggatgtcttctgtttgaattatggagaagaaaacaaagttaatagttaataattattatggaaacttctgagtccttcaggaagttaaaagcagtgtggtgcagtgaggacaatatggtaatgggcagagggagatgaaggttttagacagggttctacactgtgtcaccacaagacagaagacaaggcacagggctccctgacactgagtttcttgatctgtaagttagcagttggactcatttgttctttaaagaattctttgttgaatgtttatgacatgctaaagagcagtaaaatttttttaaagcctctggcaccatgcagtgtatcttcttttcagagatatagttaataagtaaatggatcacaggtcagatggtggtagtaggttgctgtggagtaaaacaaatcaggaagggggatatggagtgttaggtggggctggattgggggagaatgtgggttgctatttcatgagggaagtcagggaaggcctcactgatgatgtgtcagcacagacctgagatgagcgagagaagagcccattgaaaactaggggagaaaaacagcatggaggtgagaattcgtttgatgtaaccaaggaaacagctatgaatgagcaggaggaagcatagggtgagctgaagttagagaggtggcagggcctagaccaccagaaagactttgactttgactctgtgatgaaaatccataggaggattctgagcagagaagggtgtgttctcatgcatgttcaggaatcactctgactgcaatattaaggactgtaaagaatttccacttgtcacccatcctctataaactctgtggcagcttactggtgtagaaggaccccaggtaggaaactcttgcaggtgggcagtgatggtgactaggaacagggaggttgtggtaaagattgttaaagtgatatggtggttaagatgtataggggataggtgagggtaggaaggaaatataataagagtcaaggaagaattcaagagttttgcttgaacacttggattgagaaggggaagactgtaagtggagaaaatttggcatttggaaaatcaagagttagttggttggggcttttggaatttatgttacttctgaaaacatccatgtagatggaggcaggaatctgaattcatgatgaagaatgaaaatttgggtgtagataactaggcaagtacagatggagaagagaaaggctccaggactaaaccaaggacactgatttctgtttctttcaaatataacattctatgtaatatagagtttggtggtgtagccacgtaaattatttttccctctccctgatatcaacatatactaattctttatatttaatttctccactactgtgttctgctgcttatggttggacccttctgcatgttttaattacccagcagaaggtgataggcatgaactaagttgtaatcaagtgattttgtggctgccatttgtcattcactctctataaactctgttacatcacaaagatatttgcttataggtaccttttaaatttcatgagaagataataattcattttactaaagatgtttaaagaacagttaatgcagctaattctgaatgataggtttttagtgtccagaggacagtaaatcagtatcaaacttttcttactcagacatcactatttgaaagaattacttggatgggcaaaaattttgtaaacatggtcctctataagtacaagcagaaattcaattgtttacaggcatgcccagattttacaatgtttcctgacatttctcccagcccttcacaaaatcttcgcgtttaatatcttcaagaaaccctatgaaatactataatccacattttacagaagaaaaaactaggggtccgaaaaaaaaaatgatttttctaagatcatagtaagtatcacagtcagaggtaagaatcgcttcaaccaaggaggcagaggttgcagtgagctgagatcatgccactgcattccagcctgggtgacagagcaagactctgtctcaaaaaaataaaaataaaaataaaattaaaaaaaagtgcctttcatccttatatttcctcatgagataataaggtctagggagggatcatttcttttttttttttttttgagacagaatctcgatctgtcccccaggctggagtgcagtggtgcgatcttggctcactgcaagctccgcctcccacgttcacgccattctcctgtctcagcctcccgagtggctgggattacaggcgcctgccaccacgccccgctaattttttgtatttttagtagagacggggtttcaccgtgttagccaggatggtctcaatctcctgacctcgtgatccgcccgcctcggcctcccaaagtgctgggattaccgtcgtgagccaccgcacccagcctctttttttaatgtttaagaaaatgcagtttttatccaaaatgagtttgtgtaccaaatattaatagtttagctaatcattgttatattcgttcattatgttatttttatttcaattcttgcttttaaaaaacccaaaactttaaaaatccttatgccttgtctattttctttacctttgttttgttttgttttgatggataattttttaataaagtgaggtttacatcactgatatttaagaatggctgtatccacaaaagaaaacaaacctttttggctaaggggtgaggaagttagaaaaagcatgagaaacaggaaacacaagaggggtgaggcggggcaggagaggaaggttgcaggcacctccagctcactccctgaggcagcacctatgaccctacagatcaaggggccatgaatgacagggattcggatttctttcattctagacttcagccttaaccttttgttccagcaccaatctaacagagcagcacaggcatttctaatccagtagcaatgctatttcctcagccagggcaggtgcctgggctgacgggaggccttcaggaacaccgcctgtcagaaggcaccacggagggtctctgaggtcctgaagaccaactggtgcccgtgatctccaaacagacaaatatttgacctttgccttcaatgacatttacacataaatagacataaataaaattctccataatttatgctcaagtctaggaagatgtggctcccacagtagattttctaatgacaaaaaaaatgtagtagctgtgtgcggtttttgagtttcacccaggtctcacggtagcacagaacataatggagaagtattgcacgcacatttaaagtaaaacatgatacactcacactgttgacaaggaccgtagtgatgcccactgcaaaaaaaatcccttatttaaacctgaaaaaaatgaaacacaccaactacaattgttcaggctataaaagttctaatgtcgcagcaaaggatatttatagaaaaaatatacttttaagaaaatagctgaaaaaatctaaagacataaggtataaaaagtttaaaaatatgtatcttaagacaaaatattgcccaaaacacttaaaactgaattgtaaaaaaatcacctgtctgaatgtaaaggaggttgatgcagctgtggttcgccgtcctctacagtgggggacacaaagagagacgaagggcccagggctgtaaggacgtcaggaccggtccagagaggagaagtcttccaggagaacagccatctctgcctggccctccacagcggggaaagtgagtgggacgggcctggggttgcagaccctgctgatgatggtctgttctgggatttctcagaatcagcagacagggcagcaaggctgggcagcgggcggcaggcgcaccctctacgggagccagtgctcacgtgtccacgcgtcagacacagctgcgagcgctcagggctctggttcaggtctccaccaggatctccaccatgtggtccagctcgcccagatcggacttgcagatggagctggggcacggggtgaccggagccaagccctcgagcccttcacaggggcccggcccggcacccccatcatgcctgtcagtactgtgtccaggttgtagtaggggctgtccacgcctgaaaacagctcttccatgtagcgggggattttagtctccagcgtttcatatatatctgatcgagtgatttgcgaaagcttcctctgttttcttgagggccatccatctcccagacgctcctccctctgcgggtgcctcggcgtctgtgctgaggtgactgggcaaaggttagaaactgagccctgtgcgtggccgtctcccaagccagaggcaggacgtgccccctcctgctcccacgccgcgcggcacagaatctccatgaagaccaagtggtccagcggcgcccaccctgcagcctggggtgtgcgccgtatcccatcctgcgtcatctcctcttggatctgccggaccacgtggcaatgaggattgagcggcacaggttgggctccacaagcatgtggcaaagctgcagcttcaccagggacatgtccaagagggactgccgctgcaagctgtacgaggacacggtcttcaagccggccagggctccctccacgtcttcctggtggccaacacgtttccccttcagtcctcgtgcaaacattgtgtctttgagagaacggttatctgggtcctgccgtctcgtgcatcccacacgaaggccacagaagaggcgaggcagcagagatcctctattccagcaagctgtcgaagcctttgtcacgacgatcctgtccgacccgcgagtctgcccgctgggtcctctgctcagccgacgccaccgccgctgccgcctgcttcccgccgctcagggaggagcgcccgccagcgcggggcctttacccttttaaaacaatcaactctgcttaggaaactagccatagttttacttcccataaaaagcttatgtgtcggcccgggcatggtgactcacgtctgtaatcccagcactttgggaggctgaggcgggtggatcacctgaggtcaggagttcgagaccagcctggccaacattgcgaaaccctctctctactaaaaaatacaaaaattagctgggcccagtggcaggcgcctgtaattccagctactcgagaggtcgaggcaggagaatcgcttgaacccgggaggcggaggttgcagtaagccaagattgagacattgaactccagcctgggagacagagcaagactctgtccaaaaaaaaaagtttgtgtgtcaatgtatgacccatagtgtcttcttttcttttcttttttaacttttattttgggttcaggggtacatgtgaaggtttgttgcataggtaaactcatgccatgggggtttgttgtacagattacttcatcaccaggtattaagcctagtacccaatattatctttctgttcctctccttcctcccaacctccacccccactctcaagtagaccccagtgtctcttgttctcttctttgtgttcatgagttctcatcatttacctcccattataagtgagaacatgtagtatttgggtttctattcctgtgttagtttgctaaggataatagcctacagctccacccatgttcccgcaaaagacatgatctcattcttttttatggctgtgtagtattccatggtgtatatgtaccacagtttttgtttgtttgtttgttttgagacagagtctccctctgtcaccatgcccagctaatttttgtatttttagtagagatggggtttcaccatgttgcacaggctggtctcgaactcctgacccgaagtgatctgcccaccgcggcctcccaaggtgctgggattacaggtgtgagccaccatgcccggccctgtaccacaatttttaatccaatctgttattgatgggcatttaggttgattccatgtctttgctattgtgaatagtgctgctacaaacattcaagtgcatgtgtgtctttctggtggaatgatttatattcctctgagtgtatatccagtaatgggattgctgggttgaatggtagttctgcttttagctctttgaggaatcaccatattgctttccacagtggttgaactaatttacactcccatcaacaatgtataagtgttcccttttctcctcaacctcgcaagcatctggttttttttttttttactttttaataatagccattctaactggtatgagatgatatctcatggtgggtttttttgtgtgtgtgtttctttaatgatcagtgatactgagctttttttcacttgcttgttggccacatgtctatcttcttttgaaatgcatctgttcatgtcctttgcccactttttaatgcattgtttgtttttctcttgtaaatttgtttacattccttttaaatgctggatattagaccggtgttggacgcataatttgcaaatattttcttctattctgtaggttgtctgtttactctgttgatagttccttttgctgtgcacaagctcttaagtttaattagattccacttgtcaatttttgcttttgttgcaattgttttaggcatctttgttataaaatctttgcctatgtccaggatgtattgcctaggctgtcttctagggtttttatagttttcagttttacatttaagtctttaatcttaatcttgagttgatttttatacatggtgtaaggaagggatccagcttcaatctgcatatggttagccagttatcccagcaccattgatttaatagggaatcttttccccattgcttgtttttgtcagctttgttgaagattagatggtggtggatgtgcagccttatttctgggctctctgttgtgttctgttggtctaggcctgtttttataccagtaccatgctctttgggttactgcatccctgtagtgtagtttgaaatcaggtaacatgatgcctccagttttgttctttttgcttaagattgccttggctgttcaggctcttttttattccatatgaattttaaaatagtttttttctagtggtgtgaaaaatgttgttgctagtttgataggaatagcaatgaatctataaattgctttgggcaatataaccattttagtgatattgattcttcctatcgatgagcatgggatgttttccattagtttgtgtcttctctgacacaatttctttgagcagtgttttgtaattctcattgtaggaatgtttcacctccctggttagctgtattcctaggtattttattctttttgtggcaattgtgaatggtattgcctattcgattcagctctggacttagctgtcattggtgtagaggaaggctagtgatttttgtacattgattttgtatgctgaaactttgctgaagctattcatcagctgagggagcttttgggctgagactatggggttttctagatatagaattatgtcataatcaaagagggatagtttgactccctctcttcctatttggatgccctttatttatttctcttgcctgattgctctggccaggacttccaatattaagttgaataggagtggtgagagacagcatccttgtcttgtgccagttttcaaagagaatgcttccagcttttgcccattcagtataatgttggctatgggtttgtcatagatggctctcattattttgaggtattttccttcaatacctacgttattgtggtgttgaattatattgaaaaccttttctccatctcctgagataatcatgtggtttttgtctttagtcctgtttatgtgatgaatcacttttattgatttgtgtatgttgaatcaatcttgcgtcctggagatgatgcttacttgatcatggtggatttgctttttggtgagctgctggattcggtttgccagtattttgttgagaatttttgcatcaatgttcataaaggatattggcctgaagttttctttttttgttgggtctctgtcaggttttcatatcagattgatactggcctcatagaatgagttggagaggatccctccctcctcaaatttttggaatagtttcagtaggaatggtacaagctcttctttgtacatctggtagaatttggctgtgaatccataagatcctgggctttgtttgtttgtttgttgtttgtaggctctttattactaattcagtttaggaacttgttattggtctgttcagggaatcaatttcttcctgattcagtcttgggagatgtatgggtccaggaatttatccatctcttctaggttttctagtttgtgtctttagaggtgttcatagtagtttctgatggttatttttatttctgaggggtcagcattaacattcccttcattatttccaatcctgtttatttggaccttctctcttttcttatttattagtctagctggtagctagtggcatatatagcttataaattttttcaaaaattagatcctggatttgttgatcttttgagtggttttttgtgtctcattttctcattttccttcagttcagctctgattttgattatttctggtcttctgctagctttggggttgatttgttcttgctcctctaattccttcagttgtaatgttaggttgttaatttcggatctttctaactttttgatgtgggtatttaatgctataaatttccctcttaaaactgtcttagctgtgtcccagggattctggtatgttgtatatttgttcttattagttttgaagaacatcttgatttctgctttaattttattatttaccaaaacaaaagtcattcgggagcatgttgtttaatttccatgtaattgcatggtttttagtgatgttcttactcttgaattctatttttattgtgctgtggtttgtgaatgtgtttagtatgatttcagttcttttgcatttgctgagaattgttttatgtccaattatgtggttgagtttagagtatgtgccatgtggtgatgagaagaatgtatattctgttgttatggggtggagagttctgtataggtctatcggatccatttggtccaatgttgagttcaggtcctgaatatctttgttaattttctgcctcaatgaagtttcccactattattgagtgggagtctatgtctctttttacgtctctaagaacttgctttatgaatttgggtgctcctttgttgggcatatatatatttagaatagttagagcttcttgttaaaatgaagcctttaccattacgtaatgcccttctttgtctttttttttttatctttgttggtttgaagtctgttttgtctgaaattaggattacaacccctgcttttttctgctttgcatttgcttggtaggttttctccatctttttattttgagcctatgggtgtcattatgcctttataagatgattctcttgaagataacataccattgggtcttgcttttttattcagcttgccactctgtgccttttaagtggggcatttggcccatttacattgaaagttaatatagacatgtgtggatttgatcttgtcattgttttgttggctagatattatgttgacttgtttgagtgacactggtctgtgtgtctggctttatagtgacactggtctgtgtgtctaagtctgtttttgtattagctggtaacagtctttctatatttagtgcttctttcaagatctcttgtcaggcaggtctggtggtaatgaatttcctttgacaaggaaacttagtttggctggatatgaaatacttggttgaagattattgtatttaagaatgctgaataaaggccccagtattagtccactcttatgctgttaataaagacatacctgagactggataatttataaaggaaaagatttcattaactcacagttcagcatggcagggaggcctcaggaaacttacaatcatggcagaagaggaagcaaacatgtccttcttcacatggcagcaggaaggagaagtatgagagccgagctaagggggaagccccttatgaaaccatcagatcacatgagaacttacatcatgagaacaggatggggaagaccacccccatgattcaattatctccacctggtcccttccacaacacgtggggattatgggaactacaattcaagataagatttggatggggacacagtgaaaccatatcagcttccaatctcttctggcttgtaaggtttcagctgagaggtccactgttagcctgatggggttccctttgtaggtgatctgccctttcctctctagctgcctttaacactctttttttttttttcatttcaaccttggaaaatctgatgattgtgtcttggggatgatcttcttgtgtaaagtcttgcaggagttctctgtatttcctaaatttgactgttggcctcctagcaggtttggggaagttttcatagatgatatgctgaaatatgttttccaagtagtttgctttcttctgggaggaactatttttcttatttgtccttgtatgtgagtttatagttctgaatataaggtgatattattttcatataggtggtagagcaacagttctgtaatcaaagttttgtctctactatgggttttttttcatcacacctcccacccacacagtctcccaacctagctgcttctcctaaggttgggatgagaaacctcttcaatgacccatttctatagagtgtcctcctcagtttgcatcaactaagcctgttttctacgaagatttcttataaatagtaatgatatcaaacagttttaagattgcctgtttgtagaggactttatatctgattccatctctatgccaaccatactgatagatagtaatagtccattgaaggatgaggaaactgagattcggagcattgcataaatcaaccaagatctgtcatccagaagatactaacattagtattagaatcacgtaaatgactccaaagtccatgtacatattcctattaatcaattcctcttaatgccaaatacaagcatttgccttttaaggcaggattatagaagactgaggaggctttcaacgtgcaggaataagtgatggtttggggttgacaggtggcagagttagaataatgagacagagaccctactcatcagtctgttgcttttctgtccactcttaagttgggaaatgcctgtcacaaaaccctgctaatttagttcactctaacttcaccatcctcacatattttttcctttaatgacaggatatggtgactacagcttctacgtacctgtttgaagccacagaaaaaagattttttttcaaaaatgtatctatattaattcctgagaattggaaggaaaatcctcagtacaaaaggccaaaacatgaaaaccataaacatgtaagtgtcgaaatattctcttaaaaaattatattttctgatattaaccatttttgccacaaattatttaagagtctttctaactgaatattatcttttttatttttgatgtttgacaatctttttcaacattctcaggctgatgttatagttgcaccacctacactcccaggtagagatgaaccatacaccaagcagttcacagaatgtggagagaaaggcgaatacattcacttcacccctgaccttctacttggaaaaaaacaaaatgaatatggaccaccaggtagaaattttggttaaaaaataattttgcagtgattgcagcatacaactttttatgcaggttaagtgtgcaggccatggggccaaagtccctagaatcaaatcctggctcccctacttactagctgtatgtgaccttaaacaagtgacctactgtctctgtggttattccctacaaaatggcaaagagaggagtttctaccttgtaaaatatttgttctacattaaactagagaatccagacaaatatactcagtacagtgtctacaaaaatataaacagagaaaagcaataataaatgtttttcttaaggcatgctttttaaattttaatttttccacttctccatagctggatattaacaaatcaccagtaagctacaagaaagccagatgtatagtaagctggaaagagtcatgttgccagttactggtcaagagaaaacactcctaggctatcagttgctgataatatcaatctatttcattgaaacagatgacattgtcagtaattgatcattttgacctataaaaatggcaatgtcatctagttcaatctaaatgctaaaataatttgtcaaaacaacaaaagtgcactttacagacaaaaatgcaaatcattgttaaaggagggctctacacatgtatcactattaaatgggaaccttgctgaatccgcataccccagaatcaccctcttctattcctgttcattgaacactcgttaagtctcttgtctctgccaaacattcagctagatctggtcctattcattacctggaccagttcccctctccagtcttgaaagttccatcatctcctcatgtcccaatcttacctcttccctgtaattatcctgaccacgtttgttttccttggcacctctaatcctttgtgcccttttagttatactttcttttcacctggcatgtccaccaaagtcagtcatttcaactacaagtataaatagctcaattctctcaccactcttatccttatgtttcattcaatttactaaatcttctgaattttccgtcttctttattcttggctcctgttatgttttgaagaatggtgaagaaaattataaaactaagtgacatgattataacaacacactttccaagctcagtgaagcactcaaagctactcaacaatatttttactcagctcttctcaactctctttctcaattcctatagcagctgttctaaaatgtctaccaattttctcaagatctccaggcactcttctcaatcccatcaattaatgtcctgattgataaaacagaggtctctacattcttcctctctatttccaaacttattaccacctacaccttctctacctgcacctttcttagaacagaaaggcttctccaatttgtaagcttaatgtccccatatcagttattgatttttcccgtatcccacacctcaaccctattctattactgataggtcaccccttcttcttagacagatctttcttccttttcacaaatgcataatgtgatatatgcatttgtgtaaaaaactcacattcctcaaggtcctaaaaaacagtaaggtttttggataaataacattagtaagaatcttatgcaattttgtaataatcatgataacaccaccaacaatcacaatagatcatttagatcacctaggcaagcaatgcagtatggccagaggctgccatagcacatattaaaagtacacacacacacgacacacacacacatggtgcaaggaaggggagagagaaatgttactagaaataggaacagagatagctggaaatgagacaatgatgtagacaggaatggaattctaagtcaaaagggctgcttttaaggtgggcatgggaggcagggaaacctgagaacgaatcaagtctgagtagactcttaaatttttcttaacacgcaccaaattcctactgcagtagctgatatgagggctttttccttttctactgaacgttctaattctgctcccacaaacctggttccatttgcctaggaaacctgaaaccagtgtttttaaagtgcattatgtagaagagtaacttagggaccttgttaatatgcagcttctgattctgtaagcaaagggtggcctgaagattctgcatttgtaactagctcccaggtgatgctgatggatgttgtccagaaccacagtttgaatagcaaagacttaaaaaagaaacatgacggctgggcaaggtggctgatgcctgtaatctcagcactttgggacgctgaggcgggcagatcacgaggtcaggagttcgacaccagcctggccaacgtggtgaaaccccatctctacgaaaaatacaaaaaattagccgagcatagtggcaggtgcctgtaatctcagctactcgggaggctgaggcaagagaatcacttgaacccaggatgcagaggttgcagtgagctgagatcgcgccattgcactccagcccaggcgacagtgcgagactccatcttaaaaaaaaaaaaaaaaaagaagaagaaagaaaaagaaaagaaacatgacttcttcatactgtggtgtattttcctcccattttcagattcatatgaggtcgtttgagctacagaaacacacattgtagcagaagagactttatttccaatctttccttctccatctgtttcctctgaagtttttcccaacattgctaaaatgaaagttctactttccttctttcagcatctcaagctgtggatttacttttattcctccatttattgtgaaattcttattaaaaaaattttttatttgaactccctctctcaaaactttcccaagtgaaggactaaatctcacacatctttatattttttaatacctagtattgcattgaatatatatatataattaaaaattgtttcatataattaatgcctatgtgtcttaaataccataaatgaattccttcattttaacatccccatggttataatttggagaaccataaaccattgtactaagactttttaccaccaagaaccaaaacacaaatcccagtccactcagcccatagcatatcctcccttattgtttcattgatttaacatgtcgtggaataagaagataatatattacataatatagcataatataatgtaatttaatgcaataggcttttttatacactgaaatataaatgttgatagttgttgaaaaccgaaatctaaatatattttataattgaaagagaagcttcttaaaatatgatacaaaacgtgtcacttggattatgatcatgtatttgaaatgctttcccacaggcaaactgtttgtccatgagtgggctcacctccggtggggagtgtttgatgagtacaatgaagatcagcctttctaccgtgctaagtcaaaaaaaatcgaagcaacaaggcatggctatttaaattttctaaactgacttcaggcttttatccattcttattttcctactttgatttcttccaaaatcattcttaatgcagacaatatgtcacaaaacaatgcttttatttttttttagaaagtgtatctttaagtagttgattgctatttaaaacatacataatttcaatggcaagcattcagttgacaatttaacatattttatacctctctaccatagcctccagaactcacttgcttggagttgggcatgtaaatggatatacaatatgctgggataagatcaaagttatttacattacacaagaatgcacaaacatggttaagtagtgctaaatgtggactgagtaagaaatcaagcagcttcaaggagccaagcaggaacttcttggagatttataaaggttattttataatgccgtctagcatcacagttaataataaactctccttttgattctgtgatcaaaagagcaaaatagttgggaagaatcaatttaaaattaaaattggtgctatcacctcatcaatgtagatgtcctgctggggcgtgggacttgacactaatgtgagaactgaaaggtatatgatttcaatcaaggtccttcctctgccccattgcaccaattttcaggcacatcttttagagagtattacatttattgcatttgtttatgtcatattccccttagatgtacaactgctgctgcagaatattcagcatgattttccacatagatagtttcatcatgtccacctagtttggaagcaatagaagcatcgacatatttataagactctctaaatagctgaatagaaactattcatcatttcctgaatttgaactgaaagcctattgaaaagacaaaatatgttcacatctcagcatatttgttgtaatcactgccacctgtggtcaattacattccataaaacataggtctaaaatgtctccatcattttttattctaccatgggattcttggcagcacctcatcttcgcttccaatcacatttccctttggataaaaatgctctttgagtaataagaacatttgtgtctatcccatgtactattttttgggaatatcttctttggaaggaaatctacaaagaacttcaagctaaagtggtactcagagtaaattgtctcaaaaattctcttatccaggtccctatagcatatttaccaccaaaagtccagcaggagagatgtctaagctttaatacaaggagagaactcattagaggagagaactcaaccattgtgtttatctggaggccccacttaaaatttccctctagaatttcttaaaaaatagataattattttgattggaacccttaaaccctatagccaggataggaagtacatggtaccatagaagaataaacatcttgatataaagttcatcatgaatagaaccacttaagatttctgtaagtgctaatgattcagttgcctcaaagattaactgtcatatattttcaggtgttccgcaggtatctctggtagaaatagagtttataagtgtcaaggaggcagctgtcttagtagagcatgcagaattgattctacaacaaaactgtatggaaaagattgtcaattctttcctgataaagtacaaacagaaaaagcatccataatgtttatgcaaagtattgattctgtaagtatgctgataattgcttccagaatttataatcaaatgacatattgtcatgtttttaaagtatctgttcaggtgacctgaggattatatatattgatatagagttctttgaacactggctaacacatagtatttgctgaactagtgctatctagtgttatctattattacgttaccataattcttattatggtaaatctaccttattgtaatattgatgctcagtaaatgatatttcattcaacaaacaacatatctgcagaagacttttaaatttttcaggtttgtagtttgatttttaaatgcatggtatattaaaattattttttattttattaaccttttaggttgttgaattttgtaacgaaaaaacccataatcaagaagctccaagcctacaaaacataaagtgcaattttagaagtacatgggaggtgattagcaattctgaggattttaaaaacaccatacccatggtgacaccacctcctccacctgtcttctcattgctgaagatcagtcaaagaattgtgtgcttagttcttgataagtctggaagcatgggggtaagatcactttttctggatatagggatgtaggatatttgaagatccgagaacacactgaactctgtctgcacctagattgttctaaattgcatggtggcataaagtaccatcactgcccatgatcatgacttcaagatactgcagcaaaataccatagtaaaagaaagatgccagtataattaaaaatacctaatccaagggtcacttcctccttggattcctccagaaaatggactgggcttctaggctggttaaagcccttctactgtttcccaacaatgtcctgcgcatacctctgttactgtatattatatttatgttacacatttctcttccactagcctaggagatcctctaggacttggaatcatgtcttattcatctttatccccatttcctagaataaagttaatcacataggagtaatcaataaataattgttgaaatgaatgcacagcaaacaagtgggtgcaatgtgataagaaaccagaaggatggcacatttaaggcatagtgaagcatgctgaagaacaggaataaggtcttcagcaaatgagggaggtattaaaaagggcagagaatgatagaactgaaggaattgagccacaacaatgcagatagtggagacagcatgtaaaatgaagatgtagaagtttctcattgtgatttggttcagggagttcagaaggaaatttgggcataaattggcggggagtaacacagatcagtagggtgataaggactggagaagacaaatgcatgaaaaagcttacaccttagacaatcccctccgaaagagggctgggtcctgagggttaccaaagagccaattcaattaacccattagtggaaagggggcagtgagaggttaggaacagaaggagaaagtgggaagatagggccttggcctctccaaacttaaaatgaagcttgggtaagtattaccttttgggcagtctagtttccagtggatggagtgattccagtctctggttggagtctgcaacagtctggtttgatttataggcttgggggtatggttttatctgaagacaacaagcacaggagctcccaagagtaattagacagtctctaagatgtgtctcctcaccccaatttcaatgcaatccccaccctaccttccacctcttacttggatactcagtggtcaagaatcaattgtaaataaaaacctgcactccttactatacgtgtcccataatacacaccaccatttttttaatgttatcaattaaaaatttgataattgcttcctttaacaacatcaattaccattcatagaaaatgttaccaataaattctgtccattcattttatgtgatcttctattattttccagtcaaaatcacttgtttgtttttcttgtctttttaatctagggtaaggaccgcctaaatcgaatgaatcaagcagcaaaacatttcctgctgcagactgttgaaaatggatcctgggtggggatggttcactttgatagtactgccactattgtaaataagctaatccaaataaaaagcagtgatgaaagaaacacactcatggcaggattacctacatatcctctgggaggaacttccatctgctctggaattaaatatgcatttcaggtgaaaatcgtactgcaaatatattttggtttttgtttcttttcaggacattttcatgttaagtggtactgcacatgcttgcttgctgcctaattttaacataactaatcctaagaggcacaggactaagcatatagaaaaaagttctcttgatgttttaatggatcagtgaatcaatgaacaacccatgggtgaataaatgactatcaatttaccactcacttacaagcccaaggaagtcatggactttgctgtcttgttaccacgcagtagtcagtgctcgataaatgttagttaaataagtgtgcttggatgcaaaagccattaacatttggggaaatgacacaggtgatatagtatgattctacttcaagctagttctcatttgagtttctgtaacattcagctagggcaaactatttattatacctcttaaagcagatgtagcaagactgtgagtcatatttagggtaagccatacgagttagagcatgaactttgacatcagagtactgtatgtgctacttactaaccaggtaatcttaggctaacctttcagtctctttggactcttagtgacttacctatacaatataggaaataggaatgcctacctcatagagtaattatgaggattacatgaaatgatacatttacatacttagaacaatatttactatattatatagtaaatatctacttcatatactatatatactaattatataataatttattataagtgtatatttataataattagtaaatatatgtataattattatgaacattatttttagccaaatggtcatcttgagcccacaattaatataaattatgtcattttactgtttagaaatctttactgtctcttcacagtctacaaaattgtctcaatttctcagtctgatattactaaaaagtctcccccgctcagtaaaattgtcctcacttatctttcctgccttatttactccattctcccctcttgatgctctgtcctccaaacaacttactacacacattgttctccaagtccactgtgtactaacagcctccaaacctttgcacatgcaagttcctctacttaaaatgcttccttttctcccaactctgcatgttaaaattctaccaacccttcaaaatcctttctccttcatgtagcttcccatttactcccaacccaattgcatctatctcttccatggattgcatgacattttagtttaggtttgtaacatgaagtcctgcattcacattgcgattgtcacttatcaggtttgtgaccctaaacatgattcttatcctctctagtcctcaattacctcatcagtaaaataggataattaaagctagcacatagggttgctcatgttttaatttattcaaaatatgaacatgctttaatctattcaccaagcaaagctttttcactcttatggtacatgtatataagtggggaacagataataaatagataaatacaagaattgcagattatgtagatagtgttgtgaataaacgaaacagggaaaggagaactactttgggtagagaggccaatgagccttctctaaaaagtaacatttaagctctgatttgaaggatgagaagaagccagtggttcagatagaaaagaaatgcaaaagttccttaaggaaaaaggtgagaaaaaactagattattctaagaaattatagaagctagtagcagtggagtttggcaaatgaggggatatgaaatgtggttggagaggtagacaatgactagatcttaaaaaacttcaaaaaatatgaggcttgtattttgtttcaagcacaacaaaaagctcttgaagggttgaaagtatcggagtttgataatcaatttatgttccaggaagatgattccaattgccctgaataaaataaattgtaggcagtaaaagtggtaataggaagacattttgggagcttggagatggattaaattatacaatgtataaaacacagttaatacatagcgaatgttcagtaaactgtaacactacactgttatttctcttgaactatagaatattctgtagtaaatacatattagttttgtcttccttgttcatctctagatctcctcagtctctgacacaaagctccataaacattgtaaaattgaacccaattatttattaatatatgaatgtaggaatgtagttcctactgaatccccagcacggtgactggcacattgtaaatgcttggtaaataaactcatgcaagaaaaggagaggtgaaagagagaactctgcttcatctttggatcttcattttgtacttaaatgcgtgggagaagtgtgatggagatgctacaaatgccataaatgtataaaagcattttcctctctttccgttcggtttcaaggcatgtcagagaatatttcccatatattgcaatatatatattagtcactctttgcttcaaaacatgcaaaaattgtaataagcgtggtcaatttgttccctgataccagctttcttagggatttctacattccaaaccctcttctgcaaatctacacacacaccttcactccatgccaaagaaagtcactgacaatctgtcatttttcacctcttggcctggaatcaaggtctcaaaatggtgctccaagatgccaccaccaattaaaactgtcaaagaaaatgaaatatgttgtcatcctgggctaacttctctctatactcttttacaggcacctagtttcaaaactttgagtttcaaactgtttggcatttaggaaaaggatacaagctacaaattgaacttaataagtataattttaatatattctttaagcatcaccaatatgcttacttctgtgccagttattattagaagtaaatgaaagttgcataacaaagtccctaaccacatgcttagaactttccatattttttctttataagcatactgagggtttactaatttgtaatcactgactttttcaaatgttgaagtggattcttaatgcatctagctttaaatgcaagagactttataaactgaaggcttgtctgtcagaaggtagtccagtcaaagaaaacataacactaattaatgtcacatactgtgattatacctttggtatctggttgacctgagtttcccaggttgagatgttattgtcatttagtctagacaggattttccaaagcctggtcccaccgaattcctttaaataaatactacctgcagctgggagttaaaaaaattcatgtttaactttccccaaggattgttgattgaaaattctttattttaaaatagaggttatctcttctattctgcataactttgtttattttctctgtaaattttttctcatttcccatttgtctatttgatctaggaacatctgttggtaactgtgctctgcattatgtttgcaggtgattggagagctacattcccaactcgatggatccgaagtactgctgctgactgatggggaggataacactgcaagttcttgtattgatgaagtgaaacaaagtggggccattgttcattttattgctttgggaagagctgctgatgaagcagtaatagagatgagcaagataacaggtaaaacacgatccatttattccaggccttcaatagtaatgcataaatgtaaaggctgacagttcaacaacgtctcttgagtttctgccttggaggcactgaagctggggaccagacccaatctctgttctcgtggcacttggagtccagttggctggagagacaaataaaactgttgatgaaataacataatcagatagcattcctacataacaggaggaatatagaaaaataaagttctatgtgagcagaggaagccattagttttactagagttgtatagagccagggaaaggaagcatgcaaaactagctgaattctgagctgggctttgaacaggtggtgaatttctctgggaagaaaaagggggtaagaaaagatgatcaagtcatgagcaaaaaacatcacgttggggtgacaatgcaaggcgcatggagggaatggtgaaaaccccatgagaccagagcataagttgtggggtgggtgtatgtgattaacagaagctcagactgaaaagatctaaataacaatgaagtttttatataaacattaactatggtagctgttatttcagacacacagatgtgatgaaaatggattacgtgtttccaataccttcttaaacatagtagagaatatataatttatgacatgagtataaattatgttgaattggcttctaatggtactaaatatatgcttgctttttaatgcttagttatacaaaatcacatcatttcaaagtcctttcatggccattgtaaaatttatttctattccaagtagctccttaaaagtagtacttttttggatttatctctcttgctttccaattttctatctgctcattgccagttattgtgagaatacctaaatatagcagctctttcatctttctaattttctgattttggtctatgctggctgaaatatctgaaagtcaactttgttagaactaaaataaaagattaacaatcttttaacaaaagatttcacaaatctacactggctgaaatatctgaaagtcaattttgttagaaataaaagtttctctaaaagggctgtgtaaagtttgtgagctttaatacatggaattgtaacatctttcatattctataattatcatgcattttagctagctaagattttgataatgaggtattatggtagctttcattccctagttatgacattttaaaatgagcatttcagaattaacctgtacaactatgtgcttttggtctattttaataacacatactgaaactatgattttgttttaactattagcttaataatcactaaaatatatgtacttattttctagaaagcagtctaattaatgcatttacattttaggaggaagtcatttttatgtttcagatgaagctcagaacaatggcctcattgatgcttttggggctcttacatcaggaaatactgatctctcccagaagtcccttcaggtcagagttctcattccttgggttttcatgttcacttttgccacaagaaaaaaccatttggtggttataagttttgagttccatatttttctcaaagtaaatttttaattaaaatctaaactttaatcttaaatagaaattacccttagctatagccaaattaattggtgaaataagagtaaaataaatggtgaaacagcagacatactgtttcttttcctattgccatgggtttggttaagaaatgacattacaatgttataatgtcaaatttttcaccaaaaatggaccttttccaaaataaagcacccatttttcaatgaatgcattttaaaagctcatgcttccaagctttccccatgcttaacttctatgatatagatttagaaacatgaactcaagaacctggctgggaaatggaaggagtgtatcttggaaataaattaagcaggagaaagacggggtgaataatcattgtctatctacaaacatagggcttctgtcacctcttcaaccacttttttcggtggctttttttttattcacctgtcttccgaacttaacacttttgctcatctgggtcttgatagcaccaccattttctgttacttagattcaaaaactttgagtaaactttgattcttctttcttcatgtcccatgtgaacatagccagtttctctcaaaatatattttacaaaaatatttctcttcttttcattcctacatgtctatgtcatgtcactttatgccaagatttctgtctggtgttttccagctcatcagctcactgcctatattaaaacttgccatgatccctaaacaaatctattttcctctacttctcaacaatgaaaagaacagaagttatgggatgtgagcttagagtatgtacagatttgtttggacatcttgtctgcagatataacctgcaaacaagttaaaaattagtgtgagatatagactgctagtgtttggagaataagctgaaggataataaaggtcatttctgaggttgccatcatcgttgactgagaacatgatgattatagtgagaagtaaggagagagaactgattctgaagatactattttgtgttctgtttattttaaatggatggtaggaacaccaagaaacccgctatacaatatagcaactgtagttaacaacaatgtattgtatatttgaaaatcactaagtggattttatgcattctcaccacaaaaataagtatgtgaggtaatgcctatgttaatctacttgatttagccattccacaatatgtgcatatttctttgtcactttaaaaaatgagtaactaaacaaaaatggttggctcttctggactaacagctatcaacaaaaagttgaaatactttctttaaagctcttctcaaagaaagcttctacatttcctctcttctcaggatcccaacctttatgtatcagtttgccctcttgttgaatatatttactgtccagtgctactccctctatctgtgtgaaaaaattatttcaaatttccacatcaggaaaacatccatgaatgcttgccaagacaaccgggaaaaaaacagtaaggtcatattcatgactgtaaaacccttgtttctgctctacatgtttctgctctaagtctcttacttcctcactttttaattgataactgtcatatcatcaccagcttgcagagagatcacaagtctaaggtggtctgccatttataagcttgttctcaggccagaaattaaaaaccatcttgaaaaaagaataaaattactgtcttctgcagtcattaattttgaaatctatttaaacagctcgaaagtaagggattaacactgaatagtaatgcctggatgaacgacactgtcataattgatagtacagtgggaaaggacacgttctttctcatcacatggaacagtctgcctcccagtatttctctctgggatcccagtggaacaataatggaaaatttcacagtggatgcaacttccaaaatggcctatctcagtattccaggaactgcaaaggtaagcaatcagcttttagacttcctgtcaacatttttaaaaaactgaacataaattgtttaatgtcataaatgtcagtaccaaaggctgtatcaactttaaaattaagataaaatagtatgtactttccatgcctgtgtccttaaaactatgatggtaggaaaaaagaacttatatatcaagaagaaggaagaaaacgtagtcaagactgtctgagaagaactttaagaaggaaatgtaggaagagtctatgcaaattggtgggtagagagctacagggtccttccttattcaccctaccaggattgatgaatctgtggactctaaggccaaaaccaaggcaaaccttctaaaacttattttttccaattgagatgtagcgaagtgtacacatcatgaatggtactacttggcatgccctgtctgaactgcctcagcccttacccatttatcctcaacatccttaaaacctctttattctctccccattatataatttattttagaattacataatggaaatatagaaagtagcttgactttggatacttactatatttctgttgaaacttttaggtgggcacttgggcatacaatcttcaagccaaagcgaacccagaaacattaactattacagtaacttctcgagcagcaaattcttctgtgcctccaatcacagtgaatgctaaaatgaataaggacgtaaacagtttccccagcccaatgattgtttacgcagaaattctacaaggatatgtacctgttcttggagccaatgtgactgctttcattgaatcacagaatggacatacagaagttttggaacttttggataatggtgcaggtaattcacaggtttttatgaataagccaatattttcctaattcagcatgttgtgagtccctgtggcattgtggagcagtaagacaggcaacagaattgatgcagattaaggaggaacagcaggaacagcaggaaattttatctaggtaaaacctacagagtgcttagcaaatgtcttgcatgtggtaagcactcaatcaatgtttttgggctgggcgctgtggctcacttatgtaatcctagcacttcgggaggccaaggtgggcagatcacttgaggtcaggagttcaagaccagcctggcaaacatggtgaaaccccttttctactaaaagtacaaaaaattagccaggtgtggtggcacacacttgtaatcccagccacttgggaggatgaggacagaggatcacttgaacctgggaggtggaggttgcagtgagccaagatcataacaccacattccagcctgggcaacagagaaagactccgtctcaacgacaacaaaaatacccaataaataaataaaaataaaaacgtttttggttgttgaatttttttgtttgttttttttgtttttttgagatgaggtctcactctgtcgcacaggctggatggagttcagtagcaccatttcagctcactgatgcctctgcctcccaggctcaagcagtcctcctatctcagcatcccaagtagctgggatacaggtgtgtgccaccatgctcagctaatctttaaattttttttgtagagaaaaggtcaacaaaagagaaaaggtctcactatattgccccagccggtctcaaactcctaggcttaagccaccctcccaccccagcctcccaaagtgctggaattacaggagtgagccaccatgcctggccatacatgtaattttttgtcatcattgttgtttatcatccaggcaaccaatgtctgtcaccaattagaaaggtctcattcaggaggctgaggacagcatcaagaaagcctggctagagagagggtgaagcacaagcaaactaaatgtgattaagtgatagagcttgggtctctggcaggaaaagaaagcaggagtaatcctcgacagctggaacaaagtataaatatagtcctgagaactggggcccagaggcagctagcactgccacaaaagaggaagattcatcactggggcatcagataccaggtctggctggtaggaatcaagatgcaacgttggccattatctgtctccctggtctgcacagatgggtgatgcctaaagaccctttccctagattctggattgttctaggaacggaagcttctgttaagaggttaatgagcaaggaaataactatattgataggcacccgaattaacaaaattttctatcagtatattttgcaatgtaacttattcaatcattttataatcatatcttcaactagagttgcccctgagaaaaactgagaaggtgaaattgttcttttgtgtacctcaatgccttcttcagatatatcaatatttccacaactatcccttgcctcttttttccctttctgcaaatctctactacattaaaacttatatgcaccatgtttcccttctcaacattttgctagatgaccatttaggtaattggggaaatttgctaatttggaatgcctttacctgagatggtattagtgattaacaatgacatagagcagacattctttagtctgcaaatgtctttagtctgcagacaaactttagtatgcaaaggaatcatctcgagggtttgtaagaacacagaatgctgggacctttccctaggaagtctgggaaatgtgtacctctaaaaatctccagatttagtaattttagttgactgttgtgagaattaaatcctacacaaagaaaggatttttccttagtagggacccttttgatttaaacagagagatgacatagtgtgtttagagaaagcaagctgaaagcaacccagtggtggagaaattgtaagagtactatatgtaatattctgtatatgaattaataaggacagaaaggtgaagtatttaggcatttattatgcatacataaatatcagtgtgtgtgtatgtatgttatatagaaataatagatatcgaaatagctcaagggtgtcaattctacaatatattgttttggcagaatataatggaaatattctccaaagggtcaatctaaaaatattaagcctaatctagaggatatgcttgtagaggccaattgcttgtcttagaaaatgcaaaatttctctttacaagactttattccttcatttctataacaaggcgctgattctttcaagaatgatggagtctactccaggtattttacagcatatacagaaaatggcagatatagcttaaaagttcgggctcatggaggagcaaacactgccaggctaaaattacggcctccactgaatagagccgcgtacataccaggctgggtagtgaacggtgagtaactcatgatatttataatccagtgatagtttgaacaatattagtgatttgatataattaggcttcaaacaggttgattaaaactcaaaatatagcttttcccatttatggaataaagttctcagtcatactaggatttgcctctaaattaatctaagctttggtacaatgtctggcacctagtaagcactcaagcactcaaaaaaggtcaattattcttattttttttaactttcagtttaggtttgagggtacatgtgcaggtttgttatataggtaaactcgtgtcatggcggtttgttgtacagattatttcattatgcaggtactaaacctagtacccaatagttattttttctgaccctctccctcctcccaaactccaccctcaagtaggccctagtgcctattgttaccctctttgtgtccatgaattctcatcatttagctcccacttataagtgagaacacgcagtattttggttttctgttcctgcattagtttgctgaggataatggcctccagctccatccatgttcctgcaaaagacatgatctcactcaaaaacatcagttattattatgttagtttgaacatcttatgtatatcaacaataatatgcccagctttcagctcaagatgaaggaaacagaccaatttatgaacctaagcacaagcctgtgcagaatttatctttcagattacatatgctgtagagtaaacacttatttagaattttaataagtcaaaaagaaaaacagtgtgtgcagtaaagtgatgtaagaattaagaatgcattctttgctagctttctttcatctggtcccttgtgacttttaggggctttctactagcaattggaatacaatcagaagaattattccttagcacttgcagcatggagggagggacctagcacaagtgggtggaggagaactggcaatgatttccccaggtatattcccagagtgcagataattcaagaggtaaagcaattccttttttaaaaaggcacacattgaattatataatatttctgtcacccagtgtaggcttaattctaaagcaatttgttttctgattctgtcctacaatatcctaccaaagaaagaattctctcaccagttgggcgcttatgattgtcacaaaacttagtaaaaatgtgactgtatatatttttttagaaggaaaagacaagtgaagaaggtgattcactgaattataataaataccagtagttttgcccattataaaccaggaaatgtttaatgcaggggaaattgaagcaaacccgccaagacctgaaattgatgaggatactcagaccaccttggaggatttcagccgaacagcatccggaggtgcatttgtggtatcacaagtcccaagccttcccttgcctgaccaatacccaccaagtcaaatcacagaccttgatgccacagttcatgaggataagattattcttacatggacagcaccaggagataattttgatgttggaaaaggtaaggatgaagtgtcatgtgattttgacttaagtaaaaggtgctaattgcaaaaacaggggtgtaagggtgggtggggggagaatggttttatattgacagcctagcaaagtgttaattttataatctgatattttttaatcaatcaaatgacacattttaacgtggtcctacttttcatacaaagaaggtagcaatttgcagagcttaagaccagaattcagcttttattaaaaaatgagtaaggcttttgatctatctgctttgcataactagacatttttgagaataaataaaaaggaatgaatatgctatgctgcagtctctaaactacatgtaacttttttttctcagttcaacgttatatcataagaataagtgcaagtattcttgatctaagagacagttttgatgatgctcttcaagtaaatactactgatctgtcaccaaaggaggccaactccaaggaaagctttgcatttaaaccagaaaatatctcagaagaaaatgcaacccacatatttattgccattaaaagtatagataaaagcaatttgacatcaaaagtatccaacattgcacaagtaactttgtttatccctcaagcaaatcctgatgacattgatcctacacctactcctactcctactcctactcctgataaaagtcataattctggagttaatatttctacgctggtattgtctgtgattgggtctgttgtaattgttaactttattttaagtaccaccatttgaaccttaacgaagaaaaaaatcttcaagtagacctagaagagagttttaaaaaacaaaacaatgtaagtaaaggatatttctgaatcttaaaattcatcccatgtgtgatcataaactcataaaaataattttaagatgtcggaaaaggatactttgattaaataaaaacactcatggatatgtaaaaactgtcaagattaaaatttaatagtttcatttatttgttattttatttgtaagaaatagtgatgaacaaagatcctttttcatactgatacctggttgtatattatttgatgcaacagttttctgaaatgatatttcaaattgcatcaagaaattaaaatcatctatctgagtagtcaaaatacaagtaaaggagagcaaataaacaacatttggaaaaaaa

SEQ ID NO: 770 - DNA, 180218 bp, Homo sapiens
ctcagcctccctcagcgtccggagtagctaggactacaggcgcccgctaccacgcccggctaatttttttgtagttttagtagagacggggtttcaccgtgttagccaggatggtctccatctcctgacctcgtgatccgcccgcctcggcctcccaaagcgttgggattacaggagtgagccaccgcgcccggccggtactgctctttaaattttcataagtcagaaaaaactcgaatacctttatatttaattcctggtttgtgaagttttagggctttaaatactttaaactatattgtcctttcacctctttcccccccttattcggataactataaccgaaaccagcttcaacacggagaaaaaggtttaaaacatttgcacaaatactaaatgcaaatatgcaacacatttcccacataatctaaaagaaaaaagaaaaacaactcagatgagactatcttataacagggctctttgtatttagaaagtgtggtggtggtggggacaacttctgttttaagtgctaaatccagtgggaaaaatttgcctcctcacaagaacatttgcctgagatgctgattcattacaaagggacacagagctttgggttcagaaaataaagaatgcttcatatggaaaattttgtaatttattatgtgagcatgcttcaggtttcactttgcttttggtatcatcaaatgttgtagtagtaactgtacgaaatgaaattcattctatttactctaataagcagattcttgaagaaactgctctcataagctaaggttccttatgattctgcaaggaagagaagactaaagcaaatcactgtctgaaaacataacagctggctaaagtaagcattgaacaacactaagcacttcaaaacatcaagtaaaattttggcatttagtatcacataatgtatatgatctatataatataatataatatatacatacataatatctagtatagtgtttgcagttttgtaagtctaatgtattacaagaagcttaagatgtaattataatgatttttatctaaacacaattgctagtgaaataggaagactaattgccaaaatacttatttggtgtattctctcatcagtggttatcaagattttaaaaacttatgagaaatgagttccaagagcttaatccagagtaatacaagtttacttgttttgcttagctttctttatcatcctctttggcttctattccaaatcttcatcatttcctcaacatttaactgccaatgttctcagtaaaccaccttgttaatctgcttttttttcttttttttttttttttttgagatggagtctcgctgtgtcgccaggctgcagtgcagtgacgcgatcttggctaactgcaacctccgccttccgggttcaagcgattctcctgcctcaggctcccaaaaaccaccttgtttcttacttgagaaagttacagtcatccatcaattgtccaccctgcccagcacttactaatatatagacactttcttaactcctttccacatatttggaggatgatgtgtccttctagcacaaagccaagccctctcctggagcccttgattccatttctttcctccccatctccattcctggaatgttgcttcatcagtcattcccactctgttcttatcttccaccttagcccttctgttggctccaatcctgagtccatacaccccaaatctttctcatccttaaaaaatgaacaaacgaaataccccaaaacaacaaaaaataaattctcatgaccacaaaacaaaacaaacacagcaaacagaaagtcagccctttcttgaccacaaattctcttttgtctttcattccatcttttttcttcctttttgtccatgagttgccactgcttttccactcccttttcactccttaactgactgatctctaattttctctcccatcactagactaatacaattcgtgaatgttgccaatgatcattttaactcatcttattggccctacttgccaaatttgggaaaattggtcacagcctcttcttgaaactgtttgatgtttgccgctttctgataatctcttcttggtcttctcctaatctgctcatttcataattttttttttcctgtttgattctcagattttccctcttccccttgtacatcaaaaaattttaaacccaggttctttagtgatccacaggcctcctgaaattctgtgcaaaaatttgggtctttgattatgtgtaattttctaataagaaagtccatagtttacagctattctcaaaagcattaatttctctccaaaagtgtaataaccattgttctatgtggtcttgcaaggcaatcttggcaattaatttagttttttaaacaactgacatatatcaagagcatactaagcaaaagtatagtaattttcttaagtaaccctcaattaggtatgataatcttcactttacaaatcagaaaatggaggcatagagaggtgacttggcctaggagacatagcaggtaggtagctgttatagttttaattgtcttttatttgctgatgattctcaaacctgtatcaccagcccatatcctccaagcttcagattcatgaataactcagtaagtcatttctggggatactctatggggtatcaaactcagcatttttaacactgagcttattaacttcttgccccaacctgtttcttctgtattctccattcagggcccatgctacgggagtcatcttgactgttttcctttgtctcctacattcaaccaattttcagtcctattgaatttaaattcaaattataactgtttctgctaagatactaatcaccttttacctggtcttatgtaacagcgtcctacctatctgaaatcctttgatgacacagcatttcatggtgactgaataaatgggctataaggcctttgaaatataatcccaagcctggctgtctctttacaaccttctccagcctctcccttcccgtaacttatacttcagccacatcgcatgcctggattgatccagggataaaaatctaaactatttgttgggctgggtagactttatctccttgaattatgaattaattatggattctctatgaatattatttcttacgtcttttgataaaagctgggtagtgactgtcaggtattttattatctgaaaaatgccttagagcaattatttggtgttatgattgaagcacatgtattataaagctaatatacttcaaaaagtatgtattttagagatcaattgagcaaagagaaaaaggttaatgtccccttatgaaaattaaggtgcctaagctagactttgtcttgaatagacattggcctacctctgcatggagaaggcctaggagcactatagacagttaatagatttttctcagaatacaattctgggtctgctccaggataggggcagatcaatcaacaaagttccaaaggtctacactgtagaccgtggctttggcaattttagcctggaagattttcaaagcagaattaccccgagaaaaatctcagaaatccatctgagaaatgtctgagtttgaaagcttctcagtgaaccctctagagaaaattacttgtgaaatgtgccccttactaataaaaatgactgacatgctgtttggagttgtttgatataaaccaattaaaccttggagaatatttgccaaaactgtgaatttgtgtttagagatagttgaccttatgcaaactgttttttttgttgttggttacctggtagcaaaattgtgtattgagtccagtactaccatggattttttttttttttcgcaaggggaattctacttgagttatgaagttgagtgtggtttctttcagcttctgatagtctcaatgagattgctgctaattgggtatttgtttacaggttttaacaaactgtaactgttagaatttttccatgcatttatccaaaagaggcagataatttaaataagtactcaggggctacctaatttttcacttactagctatgtaccaaaacatggtgtgttagaggagctctcagtggctcaacatgtatataatgaattgtgcctcgatcacttataaaatggcccctcttgtctatcaataacctcacaccttctttgttgaaatttcaaattccagttttgtgggtacatagtaggtgtatgtacacaaatgttcacagcagcagtattaataatagccaaaaaagtggaaacaacccaaatgtcatcaagcggtgaaaagattaaacaaggtgatatatctataaaattaaaaactagcaataaaaaggaacagattgctgggcacggtagctcatgcctgtaaccccagcactttgggaggctgaggcgggcagatcacctggggtcagaaatttgagaccaggcaggccaacatggcgaaaccccatctctatgaaaaataaaaaaaattagccaggtgtggtggtgggcgcctgaatcccagctacttgggaggctgaggcaggagaattgcttgaacccgagaggcagaagttgcttgagccaagatcgcgccactgcactccagcctgggtgacagagcagcagagcgagactctgtctcaagaaaaaaaaaaaaagaaaagaaaagaaaagaaagaacagattactgatacatgctgcaacatggaggacctcaaaaacattatgattcctgaaagaagccagaattaaaagactacatattgtaaaattccattgtaatgaaatacctagaaaagacaaatttatagagacagaagctctgggcatatgtgggagtaatttactgcaaatagccacaagggaattttgccaggtgatggaaatatcctaaaattgtattgtgggtttgactgcacagttctataaatttactaaaaatcacttacaataggcagattttattatatgtaaattatatatctcaataaagttatttaaaagtgaaaagaatttcaaattctaaatcatgtgctgtagcacgtaggatgctaagagtagatcaatagacattaccatgggaggataagggaaagaggggaaaaaatgcatgttctaaggcgttaaaaaaaataacaaccttccccctttaatttctcttcaaaaattgcaagagtaatgtgaacttagtgcaataagtgaaacagtataaaggaaaataaaggcaaaatgagctattaaaatcttttcacctcatttaccccctgcacttcccatctctgggtccccaaatgacaaatgctaacaatctggtgggaatcctttcacgtatttctacatgttcatgtgcatatgtgtgtgctttggctggtgttattattattttttttccaaatcggatctcaccatatgcacaaggttatagtttactttttgtatttccacaccttcaaaacatcccttcaggtcaattacatgttacctatggagttccttaatattccatgttgccaatgtatcacagataagttgaacaccccttaccaacttccagattgtattcatcaatctgagaaataaaacaagttgtttgttattattatcccttattctgggatattatcccttatgtttgggctgctataacaaactaccatagaataggtggattataaacaatagacatttatttctcacagttctggaggctgggaagcccaagatcaaggtgtcagaaaatttggtatctgatgagggcctgcttcctggttcatatagacaggcatctccttgatgtgttgatgtgtccttacatcatggaaggagtgagggagttctctggggtcccttttataagggcactaatactattgtgcccttttaatttgtgcacataaataaattggcagagcccccgtgacctaatcacctaccaaaggccccaccactagatactcttaataccatcactttggggttaggatttcaacataggaatctttgggggacacaaatattcaatctgtagcatcttgtcagtaaaaaaaaaaaagtaagacagcacctatcctaagaatagagagaaagataggactttatcattgcttttacctttaatgaatgagttaattcaacaaaaattgattggactgctgttttcttcaacatctttttaacataactttgtgtatttatactttactttgattttcaaaaagattgaaaatggcttaggaaaattcatttatataacgtgaagaaaatgggacagagggaaagaaaatcaagaataaaatgaagctggagatagtatcggtgcataagaatgctcagaaagatggactcccaaggcccacatctctgctgggtttgtctatcttagtgcccctgagacccaggaagttcagctcaaatcctatgggtcttgaattcagctcctccactatcagtggagctggacttggacttttttttttttcttatggacaccaagtacttgttataataaatctgggtctgaaatgaggtgtagtgaataacttggaaaggtgaggtggctctgggacctcagctggggtgactcaaatggctggggtgacttggatgactggagctagagttttacttccaagacagcttcttctctcacgtgtccctcctgggctgagatggctgcaggaccagctcagtggggattgtcggtggagtatctgcctgtgcaccctccagcatggtggtctcaggatagtcagaattcttctatctggctcaggcagctccaagggtgaacaaggcagaagctgcatggctttttaatgagctcaccttagaaatcagatggcattttctcctctacaccccacaagcccacccagattctagcacatgggcttcacttcttgaaaggaggaagattaaagaatttgtggccactccataagagtcctcgtgtgaaatatttacctgagaagctcatatttgcattgtatcaaagagtaatactgaaaagctaataggccaataattttgtgtaagagttggtcttttaaaaatggggctgactgtattctgagtctaatcaggcaggatcatactcttagagactgtaaatgtcaacaaactgtcaaagaagaccttgactaaattatggccaattattcagcttgagctatttctcagctcttctgaagatgaaaacttactgggaccaagtagaagtaggtctgggtcacaaagttcagggtcattgccctaaaaataaatctgtgaaaagcaaactcaaggttctcaggtgtctcatgtgatttgaactttcatggtctcactgaacgcattaatactttggattctctgactccaggtctgccttcattagtggttctaacagtgaaactcagtccctgcacaatcatttattatgcctaagggtttttaatggaacaagaaatttatagtaaaaccttgggtaagtggtgggcacagtaacaggtactcaaaatataaggaggaataaggtggctgtcttcaaggaactcacagtctgttgggtgtttcagtcatgtgaacaaataaattgtaatacaagacactacatgtaaaagacccatgggatttcaaagagagacaatctacctgcctggggttcatattggattggcatttttaaccactgtctctctgttcacacctgagccttagagccttctctttcatgtgggctcctaggaagtctctttgatagacttcaaattcagtttctctgtctgcttagactttttagtttactgactgactaggattctgtattcctcttctcctaacattcccccttccaccaaattcctgtctcaactatgttccttgtctctgtgctctaatgactaaagagcaagagataaattcattaaacacatataaactgaacaaggattatgtgctgggaaaaatgtcagctgctggagatacagtggtgagccagttagacgcagttcatgtctgttgcaaggaacatactttatagcaggatgcttccgaggatcttggaattacgtgcttgttcttatcaaatgtgggtggattaaaccttgagaaaattagagaagactttctagccaggtgacatttgatctattttttaaataaaaaaaaaaatagaagttttccaggttgaggtgtaggtagagtggggaagatcagatattttacacagaagatacaacacatgtaaaatataggaaaggcatagctggtgtggggaataaagagagaaattcatttaagagtgtggtgagtcgtgtcagagagctcacctggtgaagcaaagtgggtcatattgagaaaggcctggtatggcccttctgattaaattttcttttgttgttgattttggtttttgagatggagtcttgctctgtctcccaggctggagtgcagtggtgcaatctcagctcactgcaacttccgcctacagggttcaagcaattctcctgcctcagcttcctgagtagctaggattacaggtgtgtgccaccacacccaactaatttttctatttttagtagagacagggtttcaccatgttggccaggatgatcttaaaactcctgacctcaggccgaggcctcccagagttttgggattacaggcgtgagccaccgagccaggccaagtttggacttaatcttgtatgcaagggacagtcagcaaaaatttacaagcaggactgtgacaaaattacattttgctgttctttaagaagaaaacccaggaggatgattgtgacagtggggaaaagacaagtagtaggaggatcagttagcagactcttgaattagcctggatgagaagtaatgagagcctgagcaaagagacggaaagtggggacatatctcagaggttaattctgagatacagttttaagatggaatccagaacatttgtcaacccagtagcctggaagactgaaggaatggtaagatcatgaatctaagatgggaaaagaggaccagattatttgacaataagatgatatcaagttttgttttggatactggaatatccaagagaagataagcagaaggcatttggagactttgatctgaaccttaaaaaggagagaagatatgctggagactcattttttggaggccgtaaaaaaggcaaatggacagaatattaaacaaatacttaagaagtgaggtgaaaaaggccaacagagatgttgaatcagcaaaccaggaggggaaccagcaaagtttcccctcctggaagggaggaaggatcaagtacttgaggaatactgctgtgttgttgatcaaagttcttttagtgcttgggtcaaatgttggcacatgtgatgacagagatagaataagaaccaggtgtcagctctgctgcttgggaagttgtcattgatggctgcaccaaaggtggtaccatatgtggtctcgggccctcctttttggttcttatcagtcaggaatcagaggggagttagaacactccccagattggtcttacttctgagaatgagaggcctctagaaccttggtacattacttatcaaaagttgaaaaacatgaggcataatctttgcatcttggtttagctctaactttaaatcattttttcaatttctgtgcctgaattttatttgcctactgtgtctagttgaatataattttttgttttctgataagccgtactctgttagagatgtttttgagtggatacgttatgtaattttatgctgaaaaacatttcaaatttttctaataacttcctccccaaggaaactaagaattttctctttcctcatcagacataaatatacaagctgacctgaaaaaagattcttgtccaaatgtaatttgtttccacaacatatttattcatttaatttacattgggaggtatattaattataaatacccagttgttcaaaaggagtcatttaatttgcatagtcccttgtgagcagtgtttggtaccaaaggatctgggctcaatttagatgctaagtggcactagggtgtggaggagttaggtaagaatgcttctggctgagtgccctggaaagattaatatccaaatactggatcatctatctggatgaaagcactgattgtagattcaaagagagtagaatggcctggtgacctggaaataataacaggggagaaaagttaccataaaaccaagccaaacaaaatccagtccaacaaaaccagacacatggtctgtcctagagaaggtggtattaaaacagggcttacagcactcaaaaattcacttccaaggtttagtctttgcattccctcattgctaatagcatttttatttttattccttttaagtgttaagatctatgtgatgactccttccttctcttttaaaattaagtgttaatcagcagtgtaattgaagcctttcctgtttggcttataaatgaaagttctcccttgtaagcatttaattaggctttccttcagatcataatctctgttgtgaaatacagtggtaatcatgcgacatctactggcttgtgtctacttaactatctgtgtttaagttgtatttttcttacttgataataagtaccttgagagcaggaaatgctagctttcaaccatctatccatccatctatccatccatgcatccatccatccatccacccatccaccccctcatccattcatttattgaacatttgagtatctatatgtgtcaggcactatgatgagcttagggataaaccagacacagtcttttccctcaaggagctcatagcctagtaagggcagtagttcccaaccagggctgcatataagaatcacctaggcatctgggctccacttctaggcagtctgtttatatggtgctgaagtctgacctgggcattggtatatattttttggaaccatcaaggttattctagtgggcaagaagattgagaatcactgagttaggcagctgggtctacaatacattgtcttataattaaaaaaaaaaaaaaaagaaaatacagtcatatacttttttttttcttttactcctagaacctagtacaaggcacaagttcttattacttattactattaggcttaatcacctacttcaatatcattagatattctgtattataattaaattatagtaattatttcatttgttaattgactttttgtcctaactcaaagagacttttggtgtctattatttttaaagaaataatgaacttagttgttgccatatttagctttatagttttcagattcttgattttatttgatgaaatgtcatttatctttttatggataaaatttttcttgtgacattaaatgcatttaatatgtacgcactcttactttgaaaaattagactttttttctttttaatttctagtttagtcaggtagtttttgttttttttgttttttgttttttgtttttttgagacgcactctcactctgtcaccaggctggagtgcagtggcatgatctcggctcactgcaacctccgcctcccgggttcaagtgattctcctgcctcagcctcccaaatagctgtgattacaggtatgtgccaccacgcccagctaagttttgtatttttagtagagacagggtttcactatgttggccaggatgatctcgatctcttgaccttgtgatctgcctgcctcggcctcccaaagtgctgggattacaggcgtgagccacctcgctctgccaggtagtttataaattaattatgacacaggtaaattatctattctaatgtacattatacatttaaaatggtaactgcaacttccatcaaatggctatgaaattagacaataaacttctgacctagggagaatttgaaagggttactttggcaatatcttggcattgggtttctgttcaatagggaacccgttgttgctcagacacccgatgtggaaatttttcttctccctcagttcaaatgagataaagatcctcctctcctcacagtgaacatgaggtaagagagcacatggggcagattactgagtgcacagatcagcgagcccaactgtagtcatactaagagaagccagttttgggtgaataagtaattagtggcagacactgtggtgtattaaacatagcaatttccttagaaatactattgataaaagagttcttatggtaaaattttggcagtgttggaacaaaaatgtaaaaatctgcaactaagaatttggtatgggaaaataacatcttggcatataccacattttctgggctcccttgcaggtcacagtgtccatgtaactaactcctggttaagaggatatggatagaaggcacatgttcaacttctggcttctgtccttgaaaagtgtgatgattccatcctttgctgtcttccttcccgctgactggaatgtggacttggtagtgagctaccttggactatgtggatgaagacaaagataaaaggaaccaaggactctgatgattctgtagagaagaggaaccgtagctgctcaaacgttcatgtgaaagaagaataaactatcagatttaagccactgctattttgggtctttgtgataaacagtgtttaccatatcctaattcactattccttccatttctaggtcaaccatgttgaattaaatatagtgctctaacttgcaatttggttttatgtctttttatctttacccatgctgttttctgtacccgaactgcactttcaaatacatttttctctatcagccggataaactactcatttttaaaaactcagattattactttctctgggaagtcttcctttgatatttctatatagagaagataatccttttatgcttgcccccactagatctcatagataattacaatgatgactctatatacactttattgagcacctaccacgtgccatgtactttaaatttactttacttacaataggtcatttaatctcgcagtggttttatggggtgtgtatgtgttaaactcactttcttttatttttgtttttaatttttttgagatggggtatcactctgttgctcccactggagtgcagtggcatgatcatagctcacctcactgcagcctcaacctcctgggctcaaacaatcaactcaccctagcctcctgaggctgggactacaggtgctcactaccatatcgcagctgcttgaaaaaaaaatctttttctttttggtagagagggggtctttgttccccaggctggtctcaaactccaggcctcaagctattctcccaccttgacctaccaaaatgccgggattacagatatgagctactgtgctcagccctcagcctaaactcattttatagatgagaaaatgcaggcttggaaaggaagactaggcaattttccccatttcataatgttagaagtccttgaatctgaacacgaattaacctggttccaattccactttctatccactatgcctttatagagttcacttcatttggcatcacatttatttgtttacatgtatatcttgtccaattatacactagattcctcacatctggctcattgagagaactcaatagatataagtttaataactaaactatcattccattttcctcaccagttaccttccaaagttatagtataactccaggtctagcacaataccccaggtgcagagccaagtatcatcgtgcatttcatatttcaggtaatatatctgtattgatttgattctccataacctaggctggcctttgttactgctagacagtacattagttggctagggatgccatagcaaaataccatagactggatgcttcaagaacagaactttatttccttacagtttagaggctggaagttcaagatcaaggcttcagcagagttggtttctggtgaggtctctctccgcagctgataaatggctgtcatctcactgtgtcctcacatgtgcaatcatcccatcatctctagtgtctctttcactcttctaagggtcccagtcctactggattagggcctcactcttatgacctcatttaaccttaattaccaccttaaagccccaaacacagtcatagggcttaggacttcaacctatgaatttggagggacataattcagtccatagcagacagcatactagaagatctggagaaagttggacatattttagtgcacaagtcaaggttccaagagtgagaaagagaggagagtgactgagcacttgggcaacagagccagaagactgtgtttgaaactcagctggctctcaaccagtagtgtgactttgagcaagtcactcaactttatcatcattagtttccttatctatgcaataaagacagtaacacctaacttaaagggattgttgtaaacataatgagtaatataaagcatataaggcagtgtctgaaacacaataatgtccaataaaagccattttgctctcttgaaaaaaatatttattattatttttccattcaaaaagacatgtcttagcttcctgtaatcctatcagctctgtcttggtggtccactctgcagcttcctttggcctcaacaattcctaaacttgacttggtactctggttctatctgctctgtgtgctgctgcatttctctctcatatcttttctgactcaacagaaaagttttcctgaagctgatcctgcctcccatgtcctgggtattgtttgtttgttaaatgatttgcatgaactcaattaaagcagtgctggcgctcccttcaaattgcaccaaacatgctacaacttgctccactttctttaaactccttcttttcatctttgctttcccagttccctcatttctaggcggtcagctcaaatatttgcatatgatctgcctgtcagacatcctcatcaaatacaaacattggcataagccatacgcaaaaatctatctttacattatgattactcctgcctttgctgacaggatggatcacattcaagcacacttatattttgggagagcatttttaccctacatccttaaaaggtagaagaaaatagggaagattttcaaaattattattccttcaaaaagcctttgagctaaaacttattactgtgttaaattagggggaattgcacagaagcttaaaagtgctctgcaaatacctctttttctgccttaaaatttaaaacccaattcctacaaaaaccagttttcctctccaatgtgtttccatgtatactattgcctggatgtgtgatgtggtataagatcagcctatctgatcatcagtatcctaaaccttctaatctttaaaatgaacatatcgataacagtcccacctatctcacactctttttcttagtattaaacaccataatatttaggaaatgctttagtaactgaaagtgctgtatctgaaataatgttcaatcccctactctggtaaatgccaacttatttttgagacttggattaaatatcacctccttggtggagctattattttccttatcataattgttgactggtggatgggtgatatggtttggctctgtgtccccacccaaatctcaccttgaattttgataatccccacatgtcaaaggcacgaccagggggagaaaattgaatcacggggtcagtttcccccatgccgttcttgtgatagtgagtgagttctcatgagatctgatggttttataaggagctttccccttcatttgacactcattctgtctcctaccaccctgtgaagaggtgccttctgccatgattgtaagtttcctgaggcctccccagccatgtggaactgtgagtcaattaaacctcttttctttataaattacccagtcttgggtatttcttcatagcagcaagagaatagactaatacaatgggtgaagtctttactcccccagtggccaggtttatttttttattttatttttattttattattatttttttactggataagattttttcttttattttttctttttaaaatttatttattgtattttaagttctatggtacatgtgcacaacgtgcaggtttgttaacatatgtatacatgaaccatgttggtgtgctgcacccattaactcgtcatttacattagttatatctcctaatgctatccctccccctccccccaccccatgacaggccccagtgtgtgatgttccccttcctgtgtccaagtgttctcatggttcaattcccacctgtgagtgagaacgtgcggtgtttgtttttttgtccttgtgatagtttgctaaaaatgatggtttccagcttcacccatgtccctacaaaggacgtgaactcatccttttttatggctgcatagtgtgtatgtgtcacattttcttaatccagtctatcattgatggacatttgggtcggttccaagtctttgctattgtgaatagtgccacaataaacatatgcgtgcatgtgtctttatagcagcatgatttataatcctttgggtatatatccagtaatgggatggctgggtcatatggtatttctagttctagatccttgaggaatcgccacactgtcttctccagtggccaggtttaatactggtggaatatgaatagaacatagatatttttctgaagtcttgttcatcagcacttgcttctctaactttggagctatgtggtcctgaatatgtctggacacagaacagacttcttgttctttccttccttctcaccttacttttcatcagtgttttatggaaaaagtataagatttggagttagactgatcaacgtttcaatcttcattctgcaactatcaccttactggaccttgggcaccttattttatctctatgagtctcagtgcttcatctgtaaaaagataattgcagcatctgctctgcaggtgattataaggactagcaatgttgactgcctggtgagttgtagttgtttaatgagtggaaatattattgttataattactaatattaatatcatcatcattcttccagtgtgaagggtaagacaagacaatctgcatattgacatggaggtagatctatcccatgatacttcagatacagttgctttgctgatttgggcaactctatctgcatgggtataaagtgaaggagctatgcaagcaaaagaggagggggcagggagggagagagagacagagagagtggaagggaggagagggagaggaggaagtattaactgtgaagacaagtgacatttgtgtgatcttttgttgtttttattactgcatccatctccaaattggagtctatctctaaaacctatggatcttttatattaatttcccagaaagtaaaatgaggctcctataatgtctttcaagtggttttctttcctgtgaggagacagatgccagagcttacacacaggctttctggagctagaggaggaagcaggaggcatgtctggtgaagcacatgggcaaggtatgtacaccaaaaaagtgtgtgtgtgtgtgtgtgtgtgtgtgtattggggtgagggttggttattgtgacctggcccagagtataggacaagccctgaccctgagtctctttgggtcagctcttgtaatagagggcaaaagagccactttctctcaagataggtagactcagatatcgattaactgagggaagccctttgacaaaagctgtggttgaggcaggttattttcttacaaaattattcattttagcttctttttatgtcctaatctacttttcttattttgtcctattctctcatgcttaggtaaaacactattttcatttttttctactaatcatggataattcactttttcaaattatttagttgtaaaagtgtcacaaacttttaatttggcttggctagggggcaaatgaccactttgtggggctagtgtatagtcaggacattgctaaattttggtagagtgaatttgcctctaattcaaaatagaatattttctggagtgctcttgggagccaacatcattgctgagaaataatcttgctagcactttagattttacaatgtaaataattatatttatttattccaggtaaatatctgacttaagctacctcaagagcatctcatattgtcatcgattaggagagtgtgtttttctctttttgctgtttcctgttgaaggccaaagctacactttttacaggaagatgagaatggccataaagtcttccataatctaattctggtctcagtcctcctcactctttcacttcggctccagaaataatgaaccacttataaccccttcttctccctgatgttgttttatgtttccctgtctttggttgtctctatctgcagtctcctccagaaacctcttcctgcctttcctatgccctgtgtatatatagcaaaattggactcattcatttttaaaagtcagctttattaaggcataatacaatgcaatatatatgataaattttaccaatttttaagagtatgtacaattcaatggcttttgacagacttatatagtcatataagcactacaattgtaatctagaacattactctgcaaaaatgttcctatgtcaccttgcagtctatcccctcctcctgcccccggccccaacatctgctgatttgttttctgtcactatagttgtgtctttaaaataatttcatataaattgaattattcattatgtagtcttctacatccagcatactgcacttagcataatgtttctgtattttgtttttgagacagagtctcaatctgttgcccaggctggagtgcagtggcctgatcttggctcatggcaacctctgcctcccaggctcaagtgatcctttcacctcagcctcctgaatagctgggactacaggcatgcaccactaacttggctaattttttgtagagaaatgttctcactatagtgccctgtctggtgtctaactcctggacttaagcaatcctccctcctcagcctcccaatgtgctgggattacaggcatgagccactgtgtccagcgagcataatgtttttgagattcatccatgatgttgcctgtatcagtagttcattcttactgttgtcaggtatgctactgtgtggatgtaccacaatttgctcatccattcaatagttattgggcatatggtgttcacacttccaactttctctagttcctttcctgatatctacctctgccacaaaaagctacataggcttaatcttttcctttgtatctgtagaaatgattctcactgttaataattatttgtctatgaatgtgtttccattaatagactgaaatccttgagagtagaaactgggtttattcatccactttccccaatgcctactgcatagttagggctcaataaagttggctgactagaacaaatataccctttaaagctgacctccagtttagcctaaaacaagatgaaagattaaaattagagccattgcttccttactgtgaatgtggcactagttttatgacccaaacagtgaagaaaaggggaggaaaatgcatgtttatggttgacatctgggaatagcttgaattttccatgaaaaaaatgtattttggcatttgggactgtatgaaatgaattaaccatctctgattggtttcagatttacaagtttctaaggaatttgaaaagggtgtggcagttaagcaatagtggaagctctacatattgaataaactaagaattttgaaggttgcacaagttccgaaaatggtccagcccttttcagtaaacatctaataagtttctcaatagtggaattggtaaaacaaaaagaaaaaaaggaaaaaggaaacacctaacaagaaagaacaaatttatgaaaggataggaaatatttctatcaaaagactttcagtaaatgctattttgttcaaagatgatctgaactgttaatagtgacttcgaagctttatctctccttcccctatcccactgttaggtatagttcattcttttatttgtgtgtgtgctttttttttttccctatggacaatatttatccttatccacatccactgatagatttaaaataggcaatgtagagtggtttgagagactccagggaaatttaattgacaggtagcttacagcaaagtcctgcagtaatgattgggttacaaaatttgcatctgagagggtgttttggcatgaggagggaggagaataaaggaaactgctgagaagtgggaggcatgcagaattttccccagcctatggcctgtcctttgaaacactttatttgaaaaatcttgcttggagaaacaaacacatgcatattcatcactatcaagcacatatatctcaatcaaaaggtgactgaacgttgaatgactatatatatataaaatgactatatatatagtgcatatatatataatgactatatatagtgtatatatataatgactatatacagtgtatatatacgtaatgactatatatagtatatatagtcattcaacgttcagttacctatgtatacatatatagagatatatatgtatgtatatgtatatatgtgtgtatctatgtatacacatatatatgtgtgtgtatatatgtacacacacatatatgtggacacatatatatgtgtgtatatatgtatacacgtacacatatataggtgtgtatatatgtatacacgtacacatatataggtgtgtatatatgtatacacatatataggtgtgtatatatgtatacacatatataggtgtgtatatatgtatacacatatataggtgtgtatatatgtatacacatatataggtgtgtatatatgtatacacatatataggtgtgtatatatgtatacacatatataggtgtgtatatatgtatacacatatataggtgtgtatatatgtatacacatatataggtgtgtatatatgtatacacatatataggtgtgtatatatgtatacacatatataggtgtgtatatatgtatacacatatataggtgtgtatatatgtatacacatatataggtgtgtatatatgtatacacatatataggtgtgtatatatgtatacacatatataggtgtgtatatatatgtacacatatatagagagagatatcagaattttcttttgattttaattttaatttcaatagtttttggggtacaggttcatacctgtacgttcagttacctatgtatacatatatatgtatatatagagatatacacgtatatgtatgtgtatatacaatatgtgcatatgcacatacatacatatatgtgcatatgcacatacatacatatatgtgcatatgcacatacatacatatatgtgtatatgcacatacatacatatatgtgtatatgcacatagatacatatatgtgtatatgcacatagatacatatatgtgtatatgcacatagatacatatatgtgtatatgcacatacatacatatatgtgtatatgcacatacatacatatatgtgtatatgcacatacatacatatatgtgtatatgcacataaacacacatatatgtgtatatgcacataaacacacatatatgtgtatatgcacataaacacacatatatgtgtatatgcacatacatacatatatgtgtatatgcacatacatacatatatgtgtatatgcacatacatacatatatgtgtatatgcacataaacacacatatatgtgtatatgcacataaacacacatatatgtgtatatgcacataaacacacatatatgtgtatatgcacataaacacacatatatgtgtatatgcacatacatacatatatgtgtatatgcacatacatacacatatgtgtatatgcacatacatacacatatgtgtatatgcacatacatacacatatgtgtatatgcacatacatacatatatgtgtatatgcacatacatacatatatgtgtatatgcacatacatacatatatgtgtatatgcacatacatacatatatgtgtatatgcacatacatacatatatgtgtatatgcacatacatacatatatgtgtatatgcacatacatacatgcgtacatatacagatatgtgtttatatatgcacatatacatatatatgtgtttatgtatgcacatatacatatatgtgtttatgtatgcacatatacatatatgtgtttatgtatgcacatatacatatatgtgtttatgtatgcacatatacatatatgtgtttatgtatgcacatatacatatatgtgtttatgtatgcacatatacatatatgtgtttatgtatgcacatatacatatatatgtgcttatgtatgcacatatacatatatatgtgcttatgtgtgtacatatacatatatgtgcttatgtgtgtacatatacatatatgtgtttatacatgtacatatacatatatgtgtgtttatatatacatatgtgtgtctttatatgtgtatgtatacatatatgtgtgtttatgtgtatatatacatatatgtgtgtttatatatgtgtatatatacatgtatgtgtgtttatatatgtgtatatatacatatatgtgtgtttatatatgtgtatatatacatatatgtgtgtttatatatgtgtatatatacatatatgtgtgtttatatatgtgtatatacatatatgtgtttatatacatataatacacatatgtatttatatatgtatacatatgtatacatatatacatagatacacatatatagtatttatatatgtatacatatgtatacatatgtatatacatatgtagggtgttttggcatgaggagggaggagaataaaggaaactgctgagaagtgggaggcatgcagaattttccccagcctatggcctgtcctttgaaacactttatttgaaaaatcttgcttggagaaacaaacacatgcatattcatcagtatcaagcacatatatctcaatcaaaaggtgactgaacgttgaatgactatatatatataaaatgactatatatatgtatttatatatgtatacatatgtatacatatatacatagatacacatatatagtatttatatatgtatacatatatatacacatatatatagagagaaagacatcagaattttcttttaattttaatttttatttcaatagtttttggggtacaggtagtttttggttacatgaataagttctttagtggagatttctgagattttggtgcacctgtcacccaaacagtgtgcactgcacccaatatgtagtctttcatccctcactccattcccacccttcccctccatgtccccaaagtacattatatcagtcttatgcttttgcatcctcatagcttagctcccacttataagtgagaacatatgatatttggttttccattcctgacttacttcacttagaataatggtctccaactccatccaagttgctgcaaaagacattcctttttatggctaggcagtattacatattgtgtgtatattgcatgttctttatccactcattggttgatggatattttgattggtttcctatctttgcagttgcaaattgtgctgctataaaatatgtgtgcatgtgtgaatgactatattttaaattaagaaattgtgtggcctttgtttacattcttttaagcctcaatttcctattctgaaaagtggagacaattataatagctatgtttttttgatcatgcgctacatgttgcatgttcattattttttatctccttaccttataaagcatgaactattttcccatgtaagagaggaagaagtgaggtacaaagaaggtaagtaatatgcctgaagtcataaagagtgagtggctaagccaggattcaaactacaccggttgtacttgacagcctgttcttgttccactgcaccacaggactcatgatgctactctgtcttgtaagcattttaaaaatgttagttcccttgccctttaccccaagtgacaaatgcctgcccatatcagagttatttccagctctaaatcctgtgtgcacgtgtgtgtgcatgtgtggtgcaggaaggagggatgttaaatgcacatgatgatagtaccataatgattaatcatgaaacagatgtttagctgtggatcatttaattttcatcgatgtaagggaaaatagggttccattttttattgtgctgttggcatagatataagggtaggccaaaaaattgggaggttagggaaagatacacacttacattggaatctgtggcaccatgttcagcacacaacaaggcacgccaggagccttctcagtggggttcaagaggaagcagaaagcagaaagtggctgatgtgaaaatccccacaattagggagtccagaataagctgagtgttgcaggacaaggacttaacaggctgctgtgagataaaagtttcatcttgtaggctagagtcttgtggtgtggcaagatttttgatttgacaaaaggacatacttcctaggaagtggtaataaagcaatattcttgagggtcactgggtgacttagcactccagtaatgatgaggttcatctcatctctgaaaggccttcaaccatatctgtctaatccatcagctctgagaatcagtctagctctgatagatctgaggttatgtattgactgatattctctttgaagagaactttcaactacagcttcaaactagaaagaaaaaataatcaacaatcaaagaaaggcaagtcacataatgagccctggttttaggctcttgagtagttacatgtactgcaaatatattccaggaatttatgctatggagtgaattagaagctgaaccttcctagaggagatttcaataaagacaccagcctcctttcttttctttgagcaggagactacatctattctcatgttacagaatggaaaaataatgcatgagctggcaaagatggccagactgacagttgagttttgtgcagcacaaactgtcatacacacttacctgttaatccctagcacatgaatgtgggtcacagccctaaatcttgtcagtggtctttcagccctactaaatcaagggaagaagagtttggtgtaatagctccctctcttccccacattgcaccaccactgcaaaaacaaaaacaaataaagcacactgaacaaaaacgaaatcctacatcagagagttagtgatttaccgtcatggggattagagactacagaggctgcactcacaaaatgatgaatgtctgtatagctgtcactgtgggctgttaccatatattagtctggcccaggcatgctattcaattaaagaaggtactaaatccagggatttggtattgaggatttaattaaggaccataattacttttgggcctttaatatgcctaaaggcagagtgagtgatgcagggccccagccttcacttgcgggcttactgtgacctcttatctgaagagctatcaccaaagaaatctcataaatttctctcaaactcttctcctttcaatccagtaagaaagtgttatgcatgtacttcttgaatagttcttttgaaatttgtatcttagtgtctgcctcaaaactcagttttatgtctgttatctcttgtatcttggattttcagttgcagcttccaattcaatattctggtgtgtgtgtatgtgtgttgtgtgtgtgtgtgtgtgtgtgtgtgtgtgtgtagaaagagagatttattattttgtgttttatgtttacctgtattttcttatttttcagtaataaccgtatgttacttttacaataagaatgcctagacaactgggcagccaacttatgagacagtttgatacattctgatatttcttttagtaaagaatgcatgctaatttgctgatattatttgaggagaaaatataaaatatacatttatcttacaattatctgtttcataactcaattataaaatatggaggttaaaaaagctcaatatgctttaaaataataataaaataataatcaggtaatatttattgagcatctaggatgtgttaaacaatattgattaaatcatttaatgctcacaataatcctaggaagtaaagaaagatttattcccatatttagaggtcaagaaattattattagcttagtgtctaaggtcacagagaggtttgggagtaatggatttctactgaactgtaactgactctagagataaattcctttgcccttccaaacagtactaaatttcactaaattttattggatagctgtgatgataaatgttttgtgtcaacttggctaggtcactgtactcagatacttggtcaaacattattctagatgtttccataaagacatattttagatgagattaacagtttaattagtagactctgacagagtaaagcagattaccctccataatgtgggtgaacctcatccaaaccgttgaagtccataaaagaaaagattactccccttgacccctgtcactgacccctaaagaagtggaaagtcagccagtacattgccttcagacttaaactgcaattccctgggtctccagggaattggcctgccctacagattttggtcttgccagcctccacaactgtgtgagccaattacttaaatctctctctgtttctctcactctctctttgcacatcctgttggttctgtttctttggagaatgctggctaagaggatagcatacacttttgttctcacaaaacttttactagacttcctgaaactgagtaattaatctttctgcttctttgtatcttactgaaattcaggacagaattgcccaacatacaataaaagagaagaagagtaaaaaaagctcaagaaatccaactgaccatttgaatagtcagctcctaaataattgagtcagctggtaaataattttagtagtaggatttttatttttatttttatttttttttttgaggcagagttttgcttttgttgcccaggctggcatgcaatggcacgatctcagctcaccgcaacctccacctcctgggttcaagtgattcttctgcctcagcctcccgagaagctgggattacaggtatgcaccaccacgccggtctaatttttgcatttttagtagagatggggtttctccatgtggatcaggctggtcttgaactcctgacctcaggtaatctgcccccctcggcctcccaaaatgcggggattataggcattagccactgcgcctggcctagtagaaaatttctaaacatgtgagtaaaatacaatgggtcagtagaacttgaatgccaaggtaaggcaaagaattttggtacaggttttatgggttcaaagattttaaaaaatattgaaaactataaattagtagaattttatttgtttgtttgcttggttgcttaatttttgtggttctagtatacattccttttattttcatttgtttatgctgctaacagcctggatccatgtttctgaacaggttaaatgatagtcttccctttgattatgctgtcaatatgatccccttcccagtcagccccagttatatatctggctgctcttctaagttgtgttgttctatgaaattcttccttcagtgttttctgtgacaatcttacttaaaataccataactgttctcattgtcagatctagcaatattggaaaagagttgcaattactatatttgataataaaagatacatgtattaaaggatatccatatttgtagctcaaggagagtcacaattcaacattctgacaactgggtcaatctgttttaataataatcactaaaggaagttgagataaccatacagggagttcttgcttgctcccaaatttcattaagggagttcccaaatcataaatttgcaataaggaaccgaaagtctgtatgacatgaatatatttactaatgaacttctacatacgagattaatctccacttatgcttccttcccctttagcaccactagggatttttgctgactgtcttgtgccttctccatcagctcttcccgatttttggatgtcacaataaaatacaaactaattgcaaagtgaaattctaaatctcacaaaaacatggatttatgcagtcactgaacacaatgttgaacttctcaactctttattgcaaaaagtacattaggcataattaaaccagttaacaatagaagacaatgaaaatctacccagatgatggagtacacagtacttcaagagattgacttgtggctgggcgcagtggctcacgcctgtaactccagcactttgggaggccgagacgggctgatcacctgaggtcagcagttcgagactagtctggccaacatggtgaaaccttgtctgtactaaaaatacaaaaattagccgggatcagtggtgtgcacctgtaatcccagctaattgggaggctgaggcaggagaatcgcttgaagccggtaggaggaggttgcagtgatccgagatggtgccattgcactccagcctgggcaatagagtgagactctgtcccacaaaaaacaaaacaaaacaaaacaaaacaaaacaaaacaaaaacagagagagagagattgatttgaatatcaaagtattaagatatgtactaaggaaaactaatgaagcactcatatatatttttgcaaaaatggcaagatttacataatactgcacaaatcaaataggaaggttatcatattgtgatctcttggaattttgttcgaaaaaatgctaccaagaaatactggaaatgcaaataatacttggttcatttttttcatcactgtaagtgcaatgagctatccattgagccacagagctacctacttggttaattctttacccttttctcttttgtttggccacagatagagaaggttgagttaataaataatactttttggttcaatggcataccatcctcattattctattaggttcttttctttttttttttctttttccttccttccttccttcctttcttcatccattttaaccgcattccataattttgttcagcttcttcccataggagctctattaatatatttagcatgtatcctactgttgtcatcctttgacctttggctcttgacttagaccccatgttagagggttctgaatattacaaaaacaagaatgtattatagaatacctgggaaactctatcactcaccttccagtgttcatggctggcacaacataatttgtagccctcaatattcactcttctgactcttcattgagtccccaggaaagtacttctcggtatctctcgctcgtatcctctcagttcaaatgcactgaaaggcggtgcgtgtgctgttggcagcattagggcagataacgtctgaagtacagggaggatttgaacagtggaaacacaggtaagagaaaagacaaattaccttgttaaatctttgctctgagatagtatgaatgttatagactgtggctaaatgaagtattatttccagtggtgaatatttccttgatttctcttcaaattgtggcttagatttgtgaattagcatgttgtttacaacagctgcacatggtagctcagaaatagtttgtaatattaaataattactcagccaaacattgttggcccattgacagaacatccagatgtgtgcgataatgattaagtccagtctaatctctaatattttgccaacttttcatcatacatatataaacatatctttatgtatgttttccaattttatcattaggaagatattttgtgaaataaaaagataaaatattgcatttaataatctttcagcttgatttatcacttttaaatctatagatacatgtgaacctccatttacattctttggctcaggccctgcaatagttatgtatggacttgatccatttatttgtttgttttaaaaaatgtgattatcctatagactctatctcattcatcctttatttttttaaagctcagcttcttgatgtaagctctacccctgtaactgtgtgtagaaacagcatgatccttctaaatatcatggaatattttttactgggcatctatcacattgtacttacctgttcacctggtggaagacagtgagattgtcttcaattttttaaaatggcaatactgtgacgagcattcttgtatatgttccctatgtacttgtatgattgtgcaatttctctccagaaaggcagcacaagtttgcactactgccagccgagcatgggggtgcttatattactacatccgtgtcaaaatatggcggtaacctgcttgctaatttttgacaattcttggtaaagtgacaatccttgttttaaatttaatttctctaactaccaatgagtttggtttcttttgttcataactaaactgtgtctttttgtttttaaagaattcatgtgtattttagatattagatccttatcaattttacaaattgcacatacttctttcaatctgctatttatttgcttactttatttacaatgtcacttactggaaagacatatttatttttcatccaatcaaattcatcaaattttaccttataatttgtactattgggatttttgtctaagaattacaaatattgtcctactccagctctctaaaatatgtcgttttatctttcagtcctgggtcttcaatgcatctgtgatcccatgtttatgtggtgttaggccttttgtccatatagtgacttagttttccattgatattgactgcagcagtctttattatcctcattgatttgtgcctttttcatcaagtagtaaattttcatgtatgcaatgatcttctgagttgtctactctgatacattgttctactttctattcctgcactattatagtgtgttttcttacactattacatattttagtatccagaaagaaagttctccttgctcttttttttttaagttgttttagctatttatgggcatttattcttctgtatcaattttaggattatttcatcacgttcctaataagatctcactagaatttctattggcatcatttcaaaattgtagattaatttgctgagcattgataactttataaaattaagttgccccattcaagaacatgagatatcactttaattattcatttaaaatgtcttctcatagagtcttaagtttctccacaagggaaataattcttcacctcaaattgctattttctctctttctgaaagtcttattttcaagatgttggcatttatacttctattctttatatcccttagttttgttttgtcttatttttttaaattttcagtcccatcgcccttttctgatactttctggaggagttccttcaacttttcttccagattattgatttattaattagtagtatatcctatttacccaatttattgttttagttcaattataatatttcttcaacttttaggacatctttatcccggttcatattacttataccctctgtatttcgttgaggatatttactgttctgacttcaaattcttcatgtggtatattattttccatttgatttttttctttcatactggttgtactcctcaggtgatcagttatgtcagcagcttgctaaatttccttggggatattatataatatgtattgggaagaattctaaagtgaggaagttcacaaatggataaataattccagtgaagataaatggtatgtggaacacaaatcaggcaaaagtgacagcatgaatgtggggacatttgtgtgttagtcttgattagttgataagggaaggcctctgaggaggttacaggtgagccaagagggaaccaaaagagagcagtaatgagaagatctgggagaaggagcatcccaggtagaagcaacacctatgtaggcattttgaggagaaacaaacttggttatacttgaaggacacacagaaagccaaggtcattgggaaagaatgacaaagtagcagagtgatatggaatgagagtaaagagatagatagggcccagttacataggtccttacaggcagaaggagttcctgttttgtttttctgaatgaaatgggaagtgtccgtaggtttctaaatatggaaggatatgatctcatttgctcctcctgcccaacatttttattacagtaattttaagcatacaacaaagtggaaagaatttttacagtgaacacttgtatgctcaccaatgttactgttaatattttacaaaacctgtcttatcacatatctattcatttgttaattcctctaactatccattaatcggtcagattgattgacctatttcaaaataatatacagactccagtatatttactcctaaatacttcagtatgtagatcattacctagagttttgggttctttctttttttgacagggtctcactctgtcgcccaggctggagtgcagtggtgcaatctcagctcactgcagcctcaacctcctgagttcgggcgatcttcccacctcagcctcctgagtagctgggatcacaagcacgcaccaccatgcccagctaatgtttgtattttttgtagacagttttgccatgttgcccaggctggtctcaattcctgggctcaagcgattctcacaccttggccttccaaagtgctgggattacaggtgtgagccaccacacctggcctgtgttctttcattttgattaaaaatttacataaaatgaaatgcttaaattgctgacttttgacaaatatttccacctctgcaactcaaacttccataaaaatacagtccattaccttcaccttaggaagtttccttgtgaccattgccagtcaatctctgtactcactgcctcagaggcaaccagtatactgattgtttttcatcattggttagtgcagcttgttgtagaatttcatataaatatattaatatggtatgtactttattgataaagtgttttgcagtcaacataatattttaaaaattcatccatgttgttgcatgtatcagtactttattactttttattgtggagtactattattattatataaatataccacagtttatgtattctattgacatttgggctgtctgtagtttatgaataaagctgtgctcaacattcttgtacaaatctttgtgtaagtgtatactattttttctcttgggtaaatatctgggagtgaaattgacgggtcattgaatatgtttcattttgtgagaaattaggaagtcttttcctaaagtgctcatagtgttttcatttgttttttaaaaacaatcattttggttgcaaggagacaagaatagaagctaggaagtcagggtattgtcaaaatctgtagccagaaactatatatagcttttagccagaatttctgtaaaatatttgtataataatattagttgccagcaaagctgatatgtgactgagaatgagataactaatcacagagccaatttcaggtgtatactttgggggtatgaaaggaattaaaaacccaagttctacttacaacccctcatttaggagaaaggtatcacacagtaaattacatggagaaaacactgctctgagcctctgtggtgttttccacgtgagtgatgagacagagtctcgctttgttgccaggctggagtacagtgatgtgatcttggcccactgcaacctctgactccctggtttaagcaattctcctgcctcagcctcccaagtagctgggattacaggtatgcgccaccatgcccagctaatttttgtatttttagtagagatggggtttcactatattggccaggatggtctcgatctcctgacctcttgatcctcccaccttggcctcccaaagtgctggcattacaggtgtgagctatcacgcctcgccaggattttgttttaaattacaggtttattagtcagggttctctagagggacagaactaatggaagatatatacacataaagggaagtttactaagtattaactcacatgatcacaaggtcccacaataggtcatctgcaggctgaggagcaaagagagacagtcctagttgcaaaactgaagaacttagagttcgatgtttgagggcagaaagcatccagcaaaggaggaagacttaggccgggaggctaagccagtttagtcttctacctgcttgtattctagccacgctggcagctgattagattgtgcccacccagattgagggtgggtctgcctttcccagcccactgactcaaatgttaatctcctttggcagcaccctcaaagacacacccgggatcaatactttgcatccaatcaagttgacacttagtattaaccatcacaagtccaccccttgtcaacttgaacccatacacatctcctgagaccatacataatcttcaaataaaaacgaaaataagttcattattacacctaatataatacaactatccttcgtacaactggaaacgcaccaatcctcaacccaaatactattatataaagttaaccatacttaaatgctgatgtgaagtcaataaatcttatgtcacatgataaaggagaaagtaataaaatgaagatattttcttagtacaagtgtatacatgcacaaacatgcttttaacaaaagaaggaggaaataggagatacataaaacaattactgtccttgtttctgcaactggtcatgtgtttgtagctggtattgattactaccttcttctactaccccattatgtattcactttgccttcagcaagcacctcagcaggtcatggttttttttttcctggtggagtgacccagactttcattcctgaagagtctgggtcatttgtggtcctgcctggattgggctgttgtagtttcccattgaccttaatcacagagcatgataatactaagagatgccctaatggatttcctgtattcaatgcatactcttcctgacttctgtgtggagtagtagactgatttcatcttgatagtccaggtcaatcaccccagccaacactgcaactcccttcttagcctgttgacttaaaggtaggaggagcccaaagtgtcgaggtggcaatcttaacttccagtttaatgggatcgttgttgtgtctccctgtggcagcattcctgcctctggaaataagacctctgggctagcagaacataatgtcgtgagaacaggaagcaaaaatgttgctagtggatcactatgggtgttggtgagtggtgccacttccacttccaccccttgaatcctggacccgtgaatcctggctatgggagaaacagtaccatatattggatgctgatttagagcacacgtgaccttctggagaactttgccccagccctgtgaagtattgtaacttagttggtgttgtaattgtggcttcaacaggccattccactgttctattaatctggctgcttcaggatgatggagaacatggtaagaccagcgaattccatgagcatgaagccactgccacatttctttagcggtaaagtgagtgccttgatcagaggcaatgctgtgtggaatatcatcacagtggataaggcattctgtgagtccacagatggtagtcttggcagaagcattgcatgcaggataggcaaacccatatccagagtaagtgtctattccagtgaggacaaacctctgtcctttccatgatggaagaagtcgagtataatcaacctgccaccaggtagctggctgatcacccccaggaatggtgccatattgagggctcagtgttggtctctgctgctggaaaattgagcacacatcagtggccgtagccaggtcagccttggtgagtagaagtccatgttactgagcccattcataacctccatccctaccaccatggccactttgttcatgggcctattgggtgacagcacgggtggctggggaaagaagctgagtggtgtccacagaatgggtcatcctattcacttgattattaaaatcctcctctgctgaggtcacctgttgatgagcactcacattggatacaaatatcttgcttttgaccacttagagaggtgcatccacatacgtcttccccgaatttctttgtcaccaattttccaatcatgcttcttccaagtcactgaccacccagccaaaccattggctacagcccatgaatcagtatataatcacgtatccggccatttttccttccaaacaaagtgcacaaccaggcacactgctcaaagttctgcccactgggaagatttcccttcaccgctgtccttcagggatgtcctagaaaggggctgtagtgctgcagctatccactttcaagtggtgcctgcatatcgtgcagaaccatctatgaaccaggccctggtcttctcttcctctgtcaactggtcatagggaactccccatgaggccattggtccaggctaggggagagaaggcagggtggcaggagtggacaccatgggcatttgagccacttcctcatgtaacttacttgtgccttcaggacctgctcgagcccgatgacgtatataccacttccatttgatgatggaatgctgctatgcaccacctactttatggctagatgggtcagaaagcacccagttcatgataggcagttcaggttacatggtgacttacatagtacatatatatatgtaaagaggggttctttaattattaactcacatgatcacaaggtcccacagtaggccatctgcaggctgaagagcaaggagagccagtatgagttccaaaactgaagaacctggagtttgatgtttgagggcaggaagcatccagcacgggagaaacatgtaggctgggaggctaggctagtctctcttttcacatttttctgcctgcttatattatagccatgctggcagctgattagattgtgcccacccaggttaagggtgggtctgcctttcccagcccactgactcaaatgttaatctcctttggcagcaccctcacagacacagccaggatcaatactttgtatccaatcaagttgatactcagtatcaaccatcatgcaaggcttatatatttttcttttttattgtgaaataaaatacatatcgagaaaaaccacacaaaataattgtctggctttgaattattgaagttaaacactttcaacttccacccaggccaaaatatagttttgccagccattctagtagcttctccaggtgacctttcccaatcacacctgtccttcttttgaaaattaaccatgtaacttctatccaagtttttttttttttttggcagggtctcactctgttgcccaggctggagtgcagtggtgcaatcacggctcactgcatcctcaacctccagggctcaagcgaccctcccacctcagccccccgagtaactgagactacaggtgtgtgccaccacacctggctaactttttctttttttgtagagatgctggtcttactatgttgctcaagctgggttgcttccttctttatggtttcatcacttgtgtgcattattagacactctaattgtttttgtctatttaaaaaatttgtatgtcttttaatctatggacttatcctccatttcattctttgccttatagtttatctgttgaaaaacttagggcatttaacacaaagtgtcctgcagtctgaatttttgttttttgttttgaatcctcatagtgaagctcaacatgctcttttgtcttctgtatttcctgaaaattggcagctaaatccagggacttgatcagactcaagtttgattttattgacctataattcctggctgtttgtctttttctgatgttagaagacattgacgctccttgcctcaattcgttaaatcattgcagattgcaaaagggtgatgttctatttccatcatttggttttcaattattagttgaaataccttgcataaagagatgctgctttcatcttctatttgtttggatagtggcacagtttatataagaaaggcaaaataaatgtctgattctagccctttacctgtttttaagataatacattggttctatatcatcctctgaagctaagcaattaattttatatacatagtttttgaaaaaagagagggaaggagtttgaaaaaatattggaaaagctcttttacatgaaatgctaacaattgtaccagcattctaaaggaatggcttctttgtcaagttatactgtgtgtatccctctgtgtttgtgtgtgtgcatatgccaaaggagaaacacactgtcattataaaaaacattgataagtaattgttctttggctaatataacttagcactcctcattttccacacagtaaattttctgtaaaacaagacaaattactgctgtttgtctgtactatgacataatgcactatattaaatcatctttatggaagtttctatccttacatttatgtgagaaactttatgtagccatttacttgctttacaaattcttcagcagtataataaatcagagttacctaattaagtgttaatatgtaaggatataaagttggccagactcacataatctcactttatttatttctttcaggaagtagaataacatcccctctaacaaataaaaagtaataacacactcctatgaaaaggctgtcctttggtggccagacattttggaacgtggaattacagctctaatctgggcaaagctgctgtggcttctgttccaggctggctgactctgttgtacctagcatagcactgttccacttctttaaagggggccacacataggaatctttgtttcctctctggcggtgatcaagtaaatggagtgtattttttcaggcctcagatagaatcagccacataactaagcctgaaaaaatcttgttcccagggccttgtcagctaaaatcctctcagactagctgatagggtgtgtagagatttaaaataatagctccacatgccctttgcaataataatgaacaggtattagaaaatctgttacggtaccctagcccagttttcaactctgtttcgcaaacactctcttggtctggtagctacttgcataattgctggcatttcaggtaaaggaattttaaaacatttttcaaattccacactgttttccatcttaaaaaaaaacaaaaaacaaaaaactagggctattcttagcaacattagaaagcactttctgtaaataatctatgaattgtatatcaaagttcaacactgaaatgatttgccacttgagagctgaaaggattcttgcctctatttttggctttgttttgattatatgttatttatttcctaaatgatgccacccacttaatggaggtaaggtataaacatgtgaaatgaagaaagcacatttgccatttaatgtggaagcataatgttgttattatgaacccatggccctatacacgattgattaggagttgagctgatcctagcaagtttctaacactggtggcctgaatcgattgatttgtttattgctgaagctgccattagaagtaggttgattggttcaatttaaccagtgagcaatctttcctacccgtgcccattttgcgctacctgagcagattcagaggtgaataaaacatgcctctgtccttgaagaatatatagtctaaaacagtgatactcaaagtgtgggccatggacccatgctgacctacaaactgtttcttacccagtccataatgaaataagcacggcaattgagagtaaacttttaggaactctcatagcaatttaacagagtaattttaagtgtgtttattttgttctgctagtaatttcttcctattgtagttttaaaagtattggtccaaaactgagaggaaattgaaaaaaaaattggttctaaaccactgatagtttgatagcactggttgcaagcataagtcaagtgtgttcacagataactacaggtggtttgatctactgtaagtagtttgatctttctttttcattatttttgaattaagatacaattcccataccataaaacctgcccctttaaataaaatgtacaattcagtagtttttagtatattcacaaggttgtgtactcctcaccattatctaatttcagaacatttttatcattgaaaaaccccaaacctataagcagtcactccccatgcccccattcccccaagcccttggcaaaaacactaatctaccttttgtccttgtaatagagatctgcctcttctagtcatttgctataaatagaatcctacaatatgtggccttttgtgtctgacttttttcacctaacataatgttttcaagattcatccaagttttggcaagcatcagtaatttatccctttttatggctgaatgatattctaatttattatttatctaatgatattgcttatccagacatccgttggtgaacattttggttatttccactttttggctattgtgaataatgctgctctgagcatttctgtacaatttttctgtgaatgtacattttcaatttgggggttatatatacaggagtggaattgctgggtcatatggtaactctgtgtttaactttttgaggaagtgacaaactgtttccaagtggctatactattttgcatttcaacagcaatgtgtgaggttttcaatttcttcacctttgccgacacatcttgttcctcctttcattatagccatcctagtggctgtgaagtaatatttcactgtggtttttattcccccaatgactaacactaatgactaacaatcttgaatgacttttcatgtacttattgttcatttgtatgtcttctttggataaatgtctattcaagctctttgttcgtttttaaattgtttttttttttaaattgttgaatcatacaacttctgtatatattctggatactagagctttactgaatacatgatttgcaaatatctttttgtatctgtgagctgtcttttcattttctgaaaagtatcctttaaggtaaaaatgtttttaattttgatgaagtcaaatgtatatacacttttctttcttatgctttaggtgttaaatctaagaaaccattgtctaatccaaggtcatgaagatttataccgatgttatgttctaagagttttataatcctagctggatatttaggcctttgatctcttttgagttaatttttgtatgtggtgttagttaggggtccaaattcattcttttcatgtggatatctggttgtcacaggaccatttgttgaaaaagactattctttctccactcaatagtcttggcacccttgtggaaaattagttacctcattaatgaatgtatgagtttgtgtttgaactctcaagtctatttcattaatctgtatgtctatctttatgccaagttttgaaatctgggaatataagtcaaacaagtttgatcctcattttttattattttttggctattctatattccttaaatttttatatgaattatgatataagcttgtcaatttgttcaaaaaaaaagccagctgagattttgataaggatttcattgaatttctagataatttgtagagtatcaccatttaaaaaaattaagtcttctgaccggtgatgataaaatgtttctccatttaattaggccttttaaaatttgtttcaatggtgttttgtagtgtttagtacaaagtgttgcaactctttaatttatttctaagtattttattccttttagtgttattttaaatggaattattttcttaattttatattcagattattcattcctagtgtacagaaatataattgagttttgtatattgatcttgtgtcctgttacctcactgaactaatttattagctctaatagtttgtgtgtgtgtgtatatgtgtgtattccttaggattttctatatacaagatcatgtcatttgtaaatagagttagttttacttcttttcagtttggatgtctttaatttctttttcttgtttaattgccgtggctagaaccttcagtataatgctgaatagaagttatgaaaggagacatccttttctttttactgatcttactgatgactcttctgttttaatcaaagatttataaaatgtgggctatatcttcactgtgttttcaacccagtctttcctgttggaggggggtcactgttatcatttctcaggctgtccattatcttaacactttaggaatataaagaataactattcgttttgttaaaatataagtaagcccagacaagggtaataaacattataatacctatatacataataattttttacaaatccaaatgataatccacacaatgttagactaaagagctagttttcttgtaatttatcattaactgtaagctttgttatggttactttaatgaaccattgtgaatgtaagtaaattacagggcatatttcagaggtgaggtggcaaggagggaacaggcaacttttggttgttcagaatctacttactcagcaagtggaatttagaattacaggatttcaaggttgaaatggtaaattcaaaaagttcaatcattatctgatgtttgaattcccccatagatatcttttctaagtatttatgtaacttgtgagtcaatctctctagtgagaagaaactatcataaaggtcacccattacacctcaattcagagtatttattgttttaatgacttaaattatttttcacattaaaacttcctgcagagagggttgaagaaagaaaaatgagtattattattattagtagtagtagtacagttggttaaaaagttaaaattaattgctcagaagtgatttaaggataataactattagtttagaaaacgaaataagatggaaaataaaaaataagcacaatagtatgtatttttaaaattaatggccaatttttcaactattgggtcacagtgaccttagcatcatgtgtacagtaggaaaaatcaatcaaaacatttttatggaggacctttgctctaagtgcaacaagctagaaaaacttaagatatattttcttttaaggaacttaaaatctccttggaaaggtaagataagaatgtagaaagtaacagaaaatatgagtacaccaataatgtgcaccagtgaaaaggttaaaaataataagatttaaggctttctcagaagtatggggtggtcagtgaatgcattcactgggggatgaaggacatgggaagggggctgagacttgaaggattcagggactgataagatgccgtgaagatgaggcaagggagccatttcaagctaaagagtgggaggaggatggtttgagcagagatctggtgcagaaaagagaagaatgcctggaggcaagttgggtaactgcaggagataaggtttggcaaggtaaaaatgggccagatggttgagggctaggcacaggaattcagatttttgtcttgcacagatttcagagtttgaattaggaaataatttgacttagagactgtaaacacccagaaaaatgtaagagacagcagttatgtaggctttgtgattattgtagaacttcagaacggaaatgaataatctgacctatgtggacagtgatggggatggaaaagcagggatgcatgttagtgaagttgcacaagaggaatcaaaagcatttggtaacatgatctaggggtgaggggcaggtaactttcaaactttttgatgatgatcataacaagaaatgcatttatatattttgcttataattacatatacatatatatgttgtacatttataaaaaacggaaatgaaaattctaaaaaaaagtttacgcttactctaattgatgtacattgatatttgtttccttccattctattaaaaaataaactgatattaatccatgaaaatgattttatgaaccatgagtgagttgttatttgaacacaatgtttgtaggggtataatttaaaggataccagaaaattgtccttctccaagatttcttactgattttgcatttccagaattggaaattgaaattttggtcctgtgttaaagcaaatctctttggaaaggcataaactttgcaaccttttaccttacagtgagcaatttattatctttcctggaaatcatgttacgttagagcagacaatagggaaaatatggaagcctgagatgtttgtctgaaaggttgcgaaaggcaagacggtgttgagacagaaatgttgtcctctttaaaattttatatagaagttactacaataagtacaagacaaaattaatattcactcattcattctcacttaatcacaagataaaattaatattcactcattcattctcacttaatcttagccaaaaaactgagaagcaataatattcattctctgaatgaggaagaaagacttgaaggaaggtggaacaaggattggcaaacaggatagtaagccattgtttctcagccatgaggagaagatgctaaccagtacatctggaaggtgaagaacaggagaaggagaggtttggaataaccaggaataggaatagagggagaaggtgggagtgtaactgtctcaggagagcgttatatgtcaatgtatcatgtcaatgagccatgataaaagtgactctagtcctcaggtttaggcaagttgcttagtctgggtcctctatcttttgttgtgaagactcgatttcactagagtaactgtccaaacaaaccaacacacagagaattaggaaaatgggttcctaattcatctgtggtattgtcaggagaataggagagtcaggcagttagtgttcttctagtggttccaaggattagaggaaaatcatattggagaaagggcatagggcacatgccttaatttatgtgtatggagaaggatgctctctggatggctgtgataatcccaggtatctcacgttttcagcttcaatttggtgtgtggtctgcatctccatgattttgtctgggctgaggggtcagtcgtgaacacttcagggttattttgcaccaggccgcttagtcctatctagaatatggcaaatcactcttagatctaagatatcaatttagcagaaacagcagtcagtgagtgaagtcaaataatttcaatggtgcacaatggatgtattaaattttatcatagcactaacctcttctatcaattgtgtaagattacttttctcttgaaagaccagtacccttagaagaaagatcaatcttctcttattaatgcctctcttaaacagaggcattaaacttacatatttgcaacttctgcttaacatttataattaagaattcctccttaatttggagtaaattatatagaactagaataaaagatgagttccctttgccaatttatagagcaggagctggataaaaggatgcggccatgctgttttcttctcagagctacatctgctccagtgcctgaggagatgcccaaggcacagttcaaagtctctatttctaatctctagtgagagtttgataggaagaatgtggacttatccttccttgtcctgaaattgagaggaagagagggatgtgtgtgactcccctccccgtgttcagggactttgccatcaaagccttgcattattccaggagtccccacttgctttagttcgatggaaagagaatttagctggatggaggaatcaggaattccccctgaatattgtgtgccaaggaaatcttttttgtttccagtaatcataaaataacccataacacccagatgggtctgattcctggacctcaacacaaatgtcccctcattctctactctctttcagatataaaggtaaatgctatctaagccacagtaaccttgagatactgtgggcctggggcagagaagagcatctgtagaagaggcagtggaccacagtactggatctggaagttctgagcctttacttgttgaggagcagtgagtacctatttgggatttctggtgagtaacatcacctgcctcctctgacagaactccattatcatgtcattgatttctcagtgaaccatactctaaaggtattactaggagaatctggtctgtgaacatatgctcatagttctgtgtcataggaacaggtataagaatttcaaggaaataagcatatcaaatggtcactgtggaagactaattcgctgtctacattgagttagcatttgcacatttcacatgactccacacccatgataaatgatgaagaacaacaataggaagcatgcaaccagccaactgctctgagggcccagaagggctgactttgggaaactgactctccatcctttggaaaacaaggctgaagggtcctgactttttcagcacagccctctccatgcaaactgtcatgaggcaaaacactgggtcatagacctgtgattcccagccagtgtgatataggtgtcagatgatatgttcataagaacatggtaaaatgagaaaaatcacaaaatggagtaagtttgtaaataggtccaagattattacagttaaaggaattttccttattttaagattatactcggggatgtggcaagatgaccaaataggaacagctgtagtctgcagctcctagtgagaccaacacagaaggggggtgatttctgcatttccaactgaagtacccagttcatctcactgggactggttaggcagtgggtacagcccaaggagggtgagcagaagcagggtgtggcatcacctcacccaggaagtgcaaagtgctggggacctccctcccctacccaagggaagctgtgagggactgtgctatccagcctggatactaagcttttcccatggtttttgcaatccgcagatcaggagactccctcgtgtgcctacaccaccagggacctgggtttcaatcacaaaactggggtggctgtttgggaagacactgagctaactgcaggagtgtttttcataccccagtggtgcctggaaccccagcgagacagaactgttcactctcctggaaaggaagctgaagccagggagccaagtggtctagcttagtgggtcccactctcacagagcccagaaagctaagaagcactggcttgaaattctcactgcaagcacagcagtctgaagtcgatctgggacaatcaagcttggtggggagaggggtgtctgccattactaaggcttgagtaggcaatttttccctgacagtgctaaggaggccaggaagtttggactgggtggaattcaccacagcacggcaaagtgactatggccagactttctctctagattcttcctcacagggcagaacatgcctgaaagaaaggcagcaaccccagtcaggggcttatagataaaactcccatctacctgggacagagcacctgggggaaggggagactgtgggcgcagcttcagcggacttaaaggttcttgcttgccagctccaaagacagcagtggatcctgacaaggaaagatctcctagcacagtgctcaagctctgctgaaggacagagtgcctcctcaagtgggtccctgatcccctgtgcctcctgactgggagatacctcccaacaggggttgacagacacctcatataggagagctctgactggcatcaggccagtgcccctctgggataaagcttctagaggaaggagcaagcagcaatctttgctattctacagccttcactggtgatacccaggcaaacagggtctggagtggactgccagcaaactacagcagacctgcagaagaggggcctgacttttagaaggaaaactaacaaacagaaagcaacaacatcaacatcaacaaaaaggacccccacacaaaaaccccatccaaaaatcagcttcaaagatcaaaggtagataaatccaagaagatgaggaaaaactaatgcaaaaatgctgaaaaatccaaaaaccaaaatgcctcttctccaccaaatgatcacaactcttctccagcaagggcacaaaactagacggagacggtgattgatgaattgacagaagtagacttcagaaggtgggtaaaaacaaactcctctgagctaaagagcatgatctaacccaatgcaaggaagctaagaaccttgataacaggttacaggaattgctaactagaataaccagtttagagaagaacataaatgacctgatggagctgaaaaacacagcacaagaacttcatgaagcatacacaagtatcactagccaaattgatcaagtggaagaaaggatatcagactgtagatcaacttagtgagatgaggggtaaagacaagattagagaaaaaagaatgaaaaggaacaaacaaagtctccaagaaatatgggactatgtgaaaagacgaaacctacgtttgattggtgtacctgaaagtgacggggagaatggaaccaagttggaaaacacacttcaggatattatccaggagaacttccccaacctagcaagacaggccaacattcaaattcaggaaatacagagaacacaacaaagatactcatcgagaagagcaaccccaagacacataatcttcagattctctaggttgaaatgaaggaaaaatgttaagggcagccagagagaaaagtcaggttacctacaaagggaagcccatcagactaacagcgaatctctctgcagaaaccctacaagacagaagagagtgggggccaatattcaacattcttaaagaaaagaattttcaacccagaatttcatatccagccaaactaagcttcataagcaaaggaaaaaatattttacagacaagcaaatgctaagggattttgtcaccaccaggcctgccttacgagagctcctgaaggaagcagtaaatatggaaaggaaaaaccggtaccagccactgcaaaaacacaccaaaatataaagatcaatgacactatgaagaaactgcttcaactaatgtgcaaaataaccagctagcatcatgatgacaggatcacattcacacataacaacattaacgataaatgtaaaggggctacatgccccaattagaagatacaggttggaaattggataaagagtcaagacccatcagtgtgctatattcaggagacccatctcacatgcaaagacacacttaggctcaaaataaaggcatggagaaatatttaccaagcaaatggaaagcaaaaaaaaaaaagcaggggttgcaatcctagtctctgataaaacagactttaaagcaacaaagatcaaaaaagacaaagaagagcattaaataatggaaagggatcaatgcaatgagaagagctaactatcctgaatatacatgcacccaatgcaggagcacccagattcattaaacaagttcttaatgacctacaaagagacttgggcttccacaaaataatagtgggatactttaacatcacactgtcaatatgagacagatcaatgagacagaaaattaacaaggatattgaactcagctctgcaccaagcagacctaatagacatctacagaactctccacctcaaatcaacagaatatacatttttctcagcatcacatagtacttattctaaaatcaactgtgtaattggaagtaaaacactcctcagcaaatgcaaaagaaaggaaattggccaggcacagtggctcacaccggtaatcccagcactttaggaggctgaggtgggcagatcatgaggtcaggagtttgagaccagcctggccaacatggtgaaactctgcctctactaaaaatacaaaaattagccaggcatggtgacgcatgcctgtaatcccagctacttgggaggctgaggcaggagaatcgtttgaacccaagaagcaggggtttcagtgagccaagatctcaccactgcactccagcctgggcaaaggagcaagactccagctgaaaaaaaaagaaaagaaaagaaaagaaaaaagaacggaaatcataccagtctctcaggccacagtgcaatcaagttagaactcaggattatgaaagtcactcaaaaccatgtaactacatggaaattgaacaacctgctcctgaatgactactgggtaaataagaaattaaggcataaataaagaagttatttgaaaccaacaagaacaaagagacaacatgccagaatctctgtgacatagctaaagcaatgttaagagggaaatttatagcactaaatgcccacatccaaaagctagaaagatctgaaatcaacacccgaacatcaaaatgaagagaactagagaagcaagagcaaacaaattcaaaagctagcagaagacaagaaataactaagatcagaacagaactgaaggagatagagacatgaaaaacccttcaaaaaatcaatgaactgtttttttttgaaaagattaacaaaacacaccattagctagactagtaaagaaaaagagaggggtggagccaagatggctgaataggaacagctccagtctacagctcccagcgtgagcaacgcagaagacgggtgatttctgcatttccaactgaggtaccgggttcatctcactggggagtgtcggaaagtgggtgcaggacagtggttgcagtgcaccgagcatgagccaaagcagggcacgccattgcctctcctgggaagtgcaaggggtcagggaattccctttcctagtcaaagaaaggggtgacagatggcacctggaaaatcaggtcactcccaccctaatactgcgcttttccaatggccttagcaaacggcacaccaggagattatatcccgcacgtggctcagagggtcctacacccacgtagcctcactcattgctagcacagcagtctgagatcaaactgcaaggtggcagcgaggctgggggaggggcggccaccattgccgaggctagagtaggtaaacaaagcagccgggaagctcgaactgggtggagcctaccacagctcaaggaggcctgcctgcctctgtagactccacctctgggggcagggcatagacaaacaaaaggcagcagaatcctctgcagacttaaatgtccctgtctgacaactttgaagagagtagtggttcttccagcatgcagctggagatctgagaacggatagactgcctcctcaagtgggtccctgacccccaaatagcctaactgggaggcaccccctagtaggggcagactgacacctcatatgtctgggtactcttctgagacaaaacttccagaggaacaatcaggcaacaacatttgctgctcaccagtatccgctgttctgcagcctccgctgctgatacccaggcaaacagggtctggagtggacctccagcaaactccaacagacctgcagctgagggtcctgactgttagaaggaaaactaacaaacagaaaggacatcctcaccaaaaccccatctgtacatcaccatcatcaaagaccaaaggtagataaaactacaaagatggggaaaaaacagaacagaaaaactggaaactctaaaaatcagagcacctctcctcctccaaaggaacgcagctcctcaccagcaatggaacaaagctggacagagaatgactttgacgagttgagagaagaaggcttcagacaatcaaactactccaagctaaaggaggaagttcgaacccatggtaaagaagttaaaaaccttgaaaagaaattagatgaatggctaactagaataaccaatgcagagaggtccttaaaggacctgaaggggctgaaaaccaaggcacgagaactatgtgacgaatgcacaagcctcagtagccgattggatcaactggaagaaagggtatcagtgatggaagatcaaatgaatgaaatgaagtgagaagagaagtttagagaaaaaagaataaaaagaaacaaacaaaacctccaagaaatatgggactatgtgaaaagaccaaatctatgtctgattggtgtacctgaaagtgactgggagaatggaaccaagttggaaaacactctgcaggatattatccaggagaacttctccaatctagcaaggcaggccaacattcaaattcaggaaatacagagaacgccacaaagatactccttgagaagagcaaccccaagacacataattgtcagattcaccaaagttgaaatgaaggaaaaaatgttaagggcagccggagagaaaggtcaggttacccacaaagggaagcccatcagactaacagctgatctcttggcagaaactttacaagccagaagagagtgggggccaatattcaacattcttaaagaaaaaaattttcaacccagaatttcatatcctgccaaactaagcttcataagtgaaggagaaataaaatcctttacagacaagcaaatgctgagagattttgtcaccaccaggcctgccctaaaagagctcctgaaggaagcactaaacatggaaaggaacaactggtaccagccactgcaaaaacatgccaaattgtaaagaccatcgaggctaggaagaaactgcatcaaccaatgagcaaaataaccagctaacatcattatgacaggatcaaattcacacataacaatattaaccttaaatgtaaatgggctaaattctccagttaaaagacacaggctggcaaattggatagagtcaagacccatcagtgtgctgtattcaggaaacccatctcccatgcagagacacacataggctcaaaataaagggatgtaggaagatctaccaagcaaatggaaaacaaaaaaaggcaggggttgcaatcctagtctctgataaaagagactttaaaccaacaaagatcaaaagagacaaagaaggccattacataatggtaaagggatcaattcaacaagaagagctaactatcctaaatatatatgcacccaatacaggagcacccagattcataaagcaagtccttagagacctacaaagaaacttagactcccacacaataataatgggagactttaacaccccactgtcaacattagacagatcaatgagacagaaagttaacaaggatatccaggaattgaactcagctctgcaccaagcagacctaatagacatctacagaactctccaccccaaatcaacagaatatacattcttctcagcaccacactgcacttattccaaaattgaccacatagttggaagtaaagcactcctcagcaaatgtaaaagaatagaaattataacaaactgtctctcagaccacagtgcaatcaaactagaactcaggattaagaaactcactcaaaactgctcaactacatggaaactgaacaacctgctcctgaatgactactgggtacataacaaaatgaaggcagaaataaagatgttttttgaaaccaacgagaacaaagacacaacttaccagaatctctgggacacattcaaagcagtgtgtagagggaaatttatagcactaaatgcctataagagaaagcaggaaagatccaaaattgacaccctaacatcacaattaaaagaactagaaaagcaagagcaaacacattcaaaagctagcagaaggcaagaaataactaagatcagagcagaactcaaggaaatagagacacaaaaaacccttcaaaaaatcaatgaatccaggagctggttttttgaaaagatcaacaaaattgatagaccactagcaagactaataaagaggaaaagagagaagaatcaaatagacacaataaaaaatgataatggggatatcaccacagatcccacagaaatacaaactaccatcagagaatactgtaaacacctctatgcaaataaactagaaaatctagaagaaatggataaattccttgacacatacaccctcccaaggctaaaccaagaaaaagttgaatctctgaatagaccaataacaggtgctgaaattgaggcaataattaatagcttaccaaccaaaaaaagtccaggaccagatggattcacagccgaattctaccagaggtacaaggaggagctggtaccattccttctgaaactattctaatcaacagaaaaagagggaatcctccctaactcattttatgaggccagcatcatcctgataccaaagcctggcagagacacaacaaaaaaagagaattttagaccaatatccctgatgaatgtcgatgcaaaaatcctcaataaaatactggcaaaccaaatccagcagcacatcaaaaagcttatccaccatgatcaagtgggcttcatccctgggatgcgaggctggttcaacatacacaaatcaataaacgtaatccagcgtataaacagaaccaatgacaaaaaccatatgattatctcaatagatgcagaaaaggcctttgacaaaattcaacaacccttcatgctaaaaactctcaataaattaggtattgatggcatgtatctcaaaataatgagagctatctatgacaaacccacagccaatatcatactgaatgggcaaaaactggaagcattccctttgaaaactggcacaagacagggatgccctctctcaccactcctatttaacacagtgttggaagttctggccagggcaatcaggtgggagaaggaaataaagggtatttaagtaggaaaagaggaagtcaaattgtccctgtttgcagatgacatgactgtatatctagaaaaccccatcatctcagcccaaaatctccttatgctaataagcaatttcagcaaagtctcaggatacaaaatcaatgtgcaaaaatcacaggcattcttatacaccaataacagacaaacagagagccaaatcatgagtgaactcccacttgcaattgcgtcaaagaaaacaaaatacctaggaatccaacttacaagggatgtgaaggacctcttcaaggagaactacaaaccactgctcaaggaaataaaagaggatacaaacaaatggaagaacattccatgctcatgggtaggaagaatcaatatcgtgaaaatggccatactgccaaggtaatttatagattcaatgccatccccatcaagctaccaatgactttcttcacagaattggaaaaaactactttaaagttcatatggaaccaaaaaagagcccgcattgccaagacaatcctaagccaaaagaacaaagctggaggcatcatgctacctgacttcaaactatactacaaggcaacagtaaccaaaacagcatggtactggtaccaaaacagcatggtactggtaccaaaacagagatatagaccagtggaacagaacagagccctcagaaataataccacacatctacaaccatctgatctttgacaaacctgagaaaaacaagcaatggggaaaggattccctatttaataaatgatgctgggaaaactggctagccatatgtagaaagctgaaactggatcccttccttacaccttatacaaaaattaattcaagatggattaaagacttacatgttagacctaaaaccataaaaaccctagaagaaaacctaggcaataccattcaggacataggcatgggcaaggacttcatgtctaaaacactgaaatcaatggcaacaaaagccaaaattgacaaatgggatctaattaaactaaagagcttctgcacagcaaaagaaactactgtcagagtgaacaggaaacctacagaatgggagaaaatttttgcaatctactcatctgacaaagggctaatatccagaatctacaaagaactcaaacaaatttacaagaaaaaacaaacaaccctatcaacaagtgggcaaaggatatgaacagacacttctcaaaagaagatatttatgcagccaaaagacccatgaaaaaatgctcatcatcactggccatcagagaaatgcaaatcaaaaccacaatgagataccatctcacaccagttagaatggcgatcattaaaaagtcaggaaacaacagatgctggagaggatgtggagacataggaacacttttacactgttggtgggattgtaaactagttcaaccattgtggaagtcagtgtggcgattcctcagggatctagaactagaaataccatttgacccagccatcccattactgggtgtatgcccaaaggattataaatcatgctgttataaagacacatgcacacttatgtttattgtggcactattcacaatagcaaaaacttggaaccaacccaaatgtccaacaatgatagactggattaagaaaatgtggcacatatacaccatggaatactatgcagccataaaaaatgatgagttcatgtcctttttagggacatggatgaagctggaaaccatcattctcagcaaagtgtctcaaggacaaaaaaccaaacattgcatgttctcactcataagtgggaattgaacaatgagaacacatggacacaggaaggggaacatcacacaccagggcctgttgtggggtggggggagggggcaggatagcattaggagatatacctaatgttaaatgatgaattaatgggtgcagcacaccaacatggcacatgtatacatatgtaactaacctgcacgttgtgcacatgtaccctaaaacttccagtataataaaaaaaaagaaaaagagaaaaatcaaataggcacaacaaaaaatgatgaaggagatatcaccactgatcccagagaagtacaaactaccatcagagaatactataaacacctctatgcaaataaactagaaaatttaggagaaatgaataatttcctggacacatacatcccctcaagagcaaaccaggaagaagttgaatccttgaatagaccaataacaagttctgaaattgaggcaataattaatagcctaccaaccaaaaaaatcccaggaccagatggatttacagctgaattctaccagaggtacaaagaggagctggtgccattacttctgaaactattccaaataatagaaaaagaggaactcctctcagtcatcctgataccaaaacctggcagggacacaacaaaaaaagaaaatttcaagtcaatatccctgatgaacatcgacacaaaaatcgtcaataaaatactggcaaactgaatccagcagcacatcaaaaagcttatccaccacaatcaagtcggcttcgtccctgggatgcaatgctgggtcaacgtacacaaatcaataaacgtaatccatcatataaacagaaccaatgacaaaaaccacacgatttcctcaatagatgcagaaaaggcctttgataaaattcatcatcccttcatggtaaaaactctcaataaactgggtattgatggaacatatctaaaaataataagagctatctatgacaaacccatagccaatattatactgaatggcaaaagctggaagcattccctttgaaaaccagcacaagacaaggatggcctctctcaccactcctatttaacatagtattgggagttccggccagggcaatcaggcaagagaaagaaataaaggtaatcaaataggaagagaggaagtcaaactatctctgtttgcagatgacatgattgtatattttagaaaaccccattgttggctgggcatggtggctcacacctgcaatcccagcactttgggaggccgaggcaggtggctcacctgaggttgggagttcaagaccaccctgaacaacatggagaaaccccatctctactaaaaatacaaaattagccaggcgtggttgcacttgcctgtaatcccagctacacaggaggctgaggcaggagaattgctagaacccgggagacagaggtttcggtaagccaagcttgcaccattgcgctccagcctgggcaacaagagcaaaacttcgtctcaaaaacaaacaaacccattgtctcagccccaaaactccttgtctcagccccaaaactcctaaagctgataagcaacttcagcaaagtctcaggatataaaatcaatgtgcaaaaatcgcaagcattcctatacaccaataatagacaagcagagagccaaatcatgagtgaactcccattcacaatcactacaaagagaataaaatacctaggaatacaaattacaagggatgtgaaggacctcttcaaggagaatgacaaaccactgctcaaggaaataagagaggacacaaacaaatggaaaaaatttcctgctcttggataggaaaaatcatcgtgaaaatggccatactgcccaaagtaatttatagattcactgctattcccatcaagctaccattgcctttctttgcagaatttgaaaaactactttaaatttcatatggaaccaaaggagcctgtataaccaagacaatcctaagcaaaaataacaaagctggaggcatcatgctacctgacttcaaactatactacaagactacagtaaccaaaacaacatggtacaggaaccaaaacagacttatagacgaaaggggagacagaacagaggcctcagacaaaacaccacacgtttacaatcatctgatcttcaacaaacctgacaaaaacaagcaatggggaaatgattccctacttaataaatggtgctgggaaaactggctagccatatgcagaaaactaaaactggaccccttccttacaccttatacaaaaattaactcaagatggattaaagacttaaacctaaaaccataaaaaccctagaagaaaacctaggtaataccattcaaaacataggcatgggcaaagacttcatgactaagacaccaaaagcaatggcaacaaaagccaaaattgacaaatgggatctaattaaagagcttctgcacagcaaaataaactatcatcagagtgaacaggtaacctacagaatgggagaaaatttttgcaacctatccatctgatatagatctaatatccagaatctacgaggaacttaaacaaatttacaagaaaaatcaaacaaccccatcaaaaagtgttggaaggatatgaacagacccttctcagaagaagatatttatgtggccaacaaacatatgaaaaaaagctcatcatcactggtcattagagaaatgcaaatcaaggccgggtgtagtggctcacgcctgtaatcccagcactttgggaggccaaggcaggcagatcacgaggtcaggagatagagacaatcttgactaacatggtgaaaccctgtctctactaaaaatacaaaaaaaattagccgggcgtgctggtgggtgccagtagtcccagctactcaggaggctgaggcaggagaatggcatgaacctgggagatggaggttacagtgagcagagatcatgccactacactccagcctgggcgacagagtgagactccatctcaaacaaacaaagaaacaaacaaaaaaagagaaatgcaaatcaaaaccacaatgagataccatctcacaccagttagaatggctatcactaaaaaattgggaaacaacagatgctggcaaggcgctggagaaatagggacacttttatgctgttggtgggagtgtgaactagttcaaccattgtggaagacagtgtggggattcctcaaagatctagaaccagaaataccatttgactcagcaatcccattactgtgtctatagccaaaggattatacatcattctactttaaagacacatgcacacatatgtttattgcagcactatttacaatagcaaagacttggaaccaaccccaatgcccaacaatgatagactggataaggaaaatgtggcacatatacaccatggagtactgtgcagctataaaaaacgatgagttcatgtctttgcaggaacatgggtctagctggaaaccatcattctcagcaaactaacacaggaacagaaaaccaaacactgcatattttcactcataagtggtagttgaacaatgagaacacatggacacagggagcagaacatcacacactggggcctgtcggggggtggggggcaaagggagggagagcattaggacaaatacctaatgcatgcaggacttaaaacctagatgatgggttaataggtgaagcaaaccaccatggcacgtgtaaacctatataacaaacctgcacattctgcacatgtatcccagaacctaaagtaaaataataaaataaaataaaatacacttactatagaattaagccattccactcctaggtaattatccaaaaaacaaaaaacaaaaaagaaagcatgcatccacacaaagacttgtatatgaatgttaataaccatttcatttgcaacagccaaaaatagaaaaaaacctaaatggtctcttttgctgatgcccagataaacaaattgttggatataaacaatggaatactattaagcaataaaaacagtgaacttctgatacatacaacaaaaatgaattgtgtaataattatgctaaataaaaaaagccataaagagtttaaaaaatcatactcttaatttttatgtgataaaatgtccttctccttaatggaatactgtgaagagagattcttttttatggaatattgtctggttatatgtgtgtgtgtatgtgtgtgtgtgtgtgcagatacacatgtgtatgtttagtgtgcttacttggcaaaggaggagtggaaaactctttgtcttctccccttaaccttttaaggaaaattttattgtttctaaagttccaagatctgggaatcactgttttgttcagtatcaatcataatcctaaaatacatagtcccaaatgttgaaatcctgaaaacttgaaatccgtaaaagtcgctaatatctaaattgctaataactaaaatcttgaaaattatacccctgaaagattaaattccaaatgtttaaatcctgaaagctgaattctaaggaaggaattagtgtgttttttattttatgcaagatagatgcattatgctcgttgcaccatgttaggcagaactattacctcgttactgtcattatttggaaattaagtatggtttaaggagatgcatatgggtgccaagttttgtggatttaattttaggtgttaacttgaatggattaagggatacctagaaacctggtagggcattattttgggtatgtgtgtgaaggtgtttctggagaagatgagtgtgtgagtctgagtggactaggtggggaaatcctttcctctgtgctggtggacaccctctaatcggcagggggcacagagtgaacaaatatagaaggagaattggtctctctctgagagctgagacacttttctttttgtttttttgagacagagtcttactctgtccctcagggtggaatgcagtggttcaatcttggcttaccgcaacctccgcctcccaggttcaagcgattctccatgtctcagcctcctaagtagctggaattacaggcatgagccaccacgccggctaatttttgtattttttagtttcaccatgttggccaggctggtctcgaactcctgacctcaagtgatccttctgtcttggcctcccaaagtgctgggattacagctgtgagccaccatgcctgacctgggacagacttttttctgccttgaacatcagaactccaggcttgctgacctttggactccagagcttacaccagtggtctcccagcttctgagacttttggcctcagacaaagttataacattggctttcctgattctgaggccttctgagttggactaagccacattactcacattccagggtctccagcttgcagactgttggacttctcagccaccataattgcatgagccaattccactattagattccctgtcatgtgtctatatacatatcttactggttctgttactctggtgaaccctaacacagattcgatactgggaaagccaaatattattccttcttactgcatttcttgaaacacaaaggaagagatcagtgaaattatccccatgcataaaggctgtgataaattaagtgtacaaagctacttaactatgaaagatataagtttgaaaattaattattattggtgttgtgaaagtagaaaattgtttaattgcaatggccaagcaataaccagattttcaaatggacagcatatacttacaaaatttataggttacaaccactctctaaacacaagtgcagcaagtatttcaatcatagaagtgaaaacacagaagaaatctcttctgccaaattattcaatcacatgtaacttctgccacttccacattgtgtcaatttgctatgctacgtatcttatctttgcatcatttccaatactggaggtataaattgtgcaaaaacttttagagagtgctaatttattttatgcattttttttgcaaatttgactccacaaaagtgcattggcacaaggttctttccgtgtaagtattgtgtatgtatataaaaatgttgaaacttcctcagtaaatgaagagatgtcccttttgtacatctgcatttgtgaaagataaaattctcaagctctcaactctttgggtgactgcatatgtggtgatgaccccatcatggtctttgattgatcttattaaaagaattaggttaggggccaggcacggtggctcacgcctgtaatcccagcactttgggaggcagaggtgggtggatcacgaggtcaggagttcaagaccagcctgatcaacatggtgaaaccccatctctactaaaaatacaaaagttagccgggtgtggtggtgcacacctgtaatcccagctactcaggaggctgaggcacgagaatcacttgaacccagggaacggaggttgcagtgagctgagatcatgccactgcactccagcctgggcaacagagtgagactccatctcaaaaaaaaataaaaaagaattaggttgtctgatatggtatttcagatgactgcagttataaagctgggagctcacaactaccaaccatagttacatgggtttatacattttgcttttgacatatttcttttttaaaaaataaacttttattttatgttcagaggtacgtgtgcagatttgttatatagataaacacgtgtcatgggggtttattgtacagattattttgtcacccaggtactaagcctagtacccagtagtaatttttttctgatcctctccctcttcccaccctggctccactctcaactaggccccagtgtctattgttcccctttttgtgtctatgtgttcttctcatttagctcccacttataagtgagaacatgcggtatttgttcctgttcctgcattagtttgctaaggataatggtctccagctccatctacattctggcaaaagacaagagcttgtttgttttttatggctgcatagtatttcatggtatatatttaccatattttctttatccagtctaccattgatgggaatttaggttgattctatatctttgcgattgtgagtagtgttgaagtgaacattcgagtgcatgtgtctttatggcagaatgatttatattcttttggatatatacccagtaatgggattgttgggttgaatggtagttctgtttttagctctttgaggaatcactacactgctttctacaatggttgaactaatttacactctcactaatagtgtacaagcattcccttttctctgcaaccttgccagcatctcttattttttgactgtttaataatagtcattctgactggtatgagatggtatctcattatggctttggtttgcatttctctaatgatcatgatattgagcgtttttttttatatgcttgttggcctcatgtatgtcttcttttgaaaagtgtctattcatgtcctttgcccactttttttatgtggatgtttgttttctttcttgaaaatttatttaagtttcttatagatgctggatattaggcctttgtcagatacgtaatttgcagatattttctcccattctgtatgtttgtttctgtatgtttgcttactctgtcgatagtttcttttgctttacagaagctcttaagtttgattagatcccatttgtcaatttttgcttttgttgcaattgcttttggcatctttgtcatgaaatctttgcagttcttatgtccagaatggtatcacctaggttgtcttccagggttttttcagttttgggttttacattcaagtctttaatgcatcttgagttgatttttgtatatgatgtaaaaaaggggtccaatttcagtcttctgcatatggctagccaattatcccagcaccattttactgaatagggagtcttttccccattgcttgtttttgtcagctttgtcaaagatcagatggttgtaggtgtgcaggtttatttctctgttctctattctgtttcattggtttgtgtatctgtttttgtaccagtaccatgctgttttggttactgtagccctgtagtatagtttgaagttgggaaatgtgatgcttcctggtttgctctttttgcttaggattgccttggatattagggctcttttttggttccatacgaattttaaaatagtgtttttctagttctgtgaagaatgtcattggtagtttgataggtattgcattgaatctgtaaattgcttttggcagtatggtcattttaatgatattgattcttcctatctatgagaatggaatgtttttccatttgtttgtatcatctctgatttctttgagtagtgtttgtaattctcattgtagagatctttcatctccctagttaatgatattcctaggtattttattctttttgtggcaattgtgaatggaattacattcctgattttgttcttggcttggccattgttaatgtataggaatgctagtgatttttatatgctcattttgtatcctgaaactttgctgaaattgtttatcaattaaagggctttggggctgagactatggggtttctagatatagaaacatgtcgtttgcaaacagggatagtttgacttcctctcttcctatttggatgccttttatttctttctcttgcttgggcttccaatactatgttgaatagaaatgatgagagagggcattcctgtcttgttctggctttcaaggggaatacgtttagcttttccccaagacatatttctttatgaatacagtttgtctgtctgtctgtttgtctgtttgttttttgagatggaatctcactgtgttgcccaggctagagtgtagtggtgccatctcagctcactgcaacctccgcctcctggcttcaagcgattctcctgcctcagcctcctgagtagctgggattacaggcgcccagcaccacgcccagctaatttttgtatttttagtagagacagagtttcaccatgttggtcaggcttgtctcaaaccctgatctccggtgatccacccacctcggcctcccaaagtgttgggattacaggcatgagccactgcgcccggccagtttgtctgcttataactgccacacttgtgcaactgttgttagtatacctgagttttattcttgcaaaaatatgtcattatcattgcccattttattgcaaaaagtggcatatgaagtgttcagctatgtttttacgtgtttctcaagtaagtttccttttaaaaatgtaggctgggtgcggtggctcatgcctataatcacaacacttgggaggccaaggtgagtggatcacttgaggtcaggagtttcagaccagtctggccaacatagcgaaatcccatctctactaaaaatgcaaaaaattagctgggcatggtggtgtgcgcctgtacttctgggagtttgaggcacgagagtcacttgtaccgggaggcagaagtttcagtgaaccaagattgagccactgcactccagcctgagtgacaaagtgactctgtctcaaataataataataataagtaataaaaatgaaaatgtaaacaaatgtcttttaaataattttttaaatttattttttccagagttttatttttggaattttgacttttcaggatggtgatttttgggattttaaggattttgatcttttgggatttcaacatttgggattatggccttcaggattgtgtcttttggggttacggcccaaacctgtattatccatgggttgaatcctataacactggaaggtcaaagtgagagagttcatcttagcctattgcttaaaaaattaataaattctattttagaacagttttaggtcgacagaaaaatgagcagagagttgccataaacctccttgtatccctctacaagtttctcttagtaacattttgcattattgcaatatatttgttgcaattgatgagccagtattgatacattattattaactaaagcccactgtttacattaagcttcgctcttggtgctgtacgtcagggtttggtaatatataatatatatccaccactacggtgtatactgaatagtagtactgtcctaaaatgctctgtgttgtacctattaagcatccctgcctcctctcggccttttggcaactgctgatcgtttgattgttgccatagttttgccttccctggaaggtcacatagttggaatcatacagtatgtagcccttgcagattgacttctttcatttatcaatatgcacttaaattcctccatgtctttttgtggctcgatagtttatttctttttataatattccattgtatgcctacactactgtataatattccattgtatgcctatactactgtttatttttacattcacctactgaaggagatcttggttgcctccaagttttggcagtgatgaataaagtggcatcttatcctgttttttgcatttaaacatacatgatgtagtattaatttgccaccgatgatgtactcattatgaaattttagaaagcgcagaaaatactttaaaaaatactattggtaatctcatgccaaatataacactagtagctgttatgtatatctatgttttcttttcttttcctaaatcaatatctatgtctgaaagcttatttttgcctatatatgcctcaattaattgttcttataagctcaagtattatattctatagttttgtattcttgtgtttttctccccacttaatattatatgcacatcatggaagatggggtattcactccctcaagcatttatcctttgtgttgcaatctaattatattcttctagttatttttaaatgtacaattaaattattattgacgatagtcaccctgttgtgctgtcagatactaggacttattcattaattttaattatttttttgtacctattaaccatcccctccccttctcctccccaccacccggcaacctgttttgttcatcgatgattcttcagtacacagaagagtgtctactaggcaccccaaaaatatctgttgaataagtgaaggaattgtatttttgaaatttgcatgatctcgttagctattctttggaatcaaaccaaagtttacttgtagtaaaagttattgcctgttaaattgagaatcaaaataatcatgcagtcttacagtgtttttaaggaactgatttctatagtggctttctcatatagttagtgatggcaatgtttttaccagctcatcattagcatgttctgcaacttgagggtttttcagtgatggggtaatattgttcctgccctgccccttctcttgagaataatggcacacggttgctaagaggctggtagggattaagcattctcttgagcaaaacaacactggtttgtgctggaaataactttaacttggtggtagcaatgcgctgctgacagggtcccagctagaacatgcattcttcaccatcttgaggcttccttgatgagaaccactcactgagagcagtttgtaaggttcatcaaggctgtgccttgccctccatgtatttcctgtagatttcctgggaaaccaacctcttcacttcagctgacctgaaatccccacaggtccgctcaaatgctgtatttgtttgcatccaacaaagtggaagtatagggagtgtcagtaataacatactgtttacatgggtgatagctgggaagagaaattcaccaggaaatcctggtgagactcttacattcaccaaggtgtgtggcagtgggcagactcaggagtcttcagatttcagagcaaggacctgcagcataagcaggaagaggagaaagggtgttgtcagggtgagagattatggagtcaaaggcctggaacagatgttatgtacttttaagtcttagtgaaggctagctctgttcaacaccttgcagttctattgggcgagttcataaattaaagccatctccataaaatgccattccagactaacatatgggattgacttaatttttccatttaaaaatgcctgctttatagtataagctttaaaattgctttctaagtaatgcatttaaaaaaatccgagtaggcgtgtatccatggttatggcaatgatgatagcaaagatttctgaagatagggtttttgtcctagatttttatagggtttctatttatccaccttgcttctgttttccttcagctctttttatatgatttgaaaatttgtttgccagtttttttgttgttaaaaaatttaacattatttaacatttttattttactcattaattcatttattctatcagtatttattgaatacctaaaatatgtggagcattttagacacaatgagaaatagaaaacttcaaatactctaattgaatagatgacataaacaaatctagacaggtaattaaaatacagtgtaatgttttaagaacacataggaggggcacttaaccaaaaattaacatgagaagattttcaagagtaaatgcggtctaaactagaagtagtaagaagctggaagtggagatgaggaatgaagaagtgcatctcaagagaaagaggcagcatgtgcaaaggtcctgaggtgacagaccacatggctggtcagagacctgagagtagctcagtgtgattagtgtatgaagtaagaagtaggaatggtgagagatgtgactgtggaggaaaactaggtctttattaggacaaacctcaaaaatcatattaaggaactcatattaaagacaatgggaaataattgaaggttactgtgagtgagtaggattagatagtccatttagaaagcacacattgacttccccatggaaaataacttggtaagggacaatttgcaaggcagggagacagaagacagcaaattatccagttaagagttgatgatagcctatcttaagataaaggcagtggacttaaagagagtagatcaatttgaaaaccatagtagaattactatggcttgataattgatggccagagagggtatataaaggagaaagataagggaatgatattgactctcttagtgtggtttctccctaaaagcaagtctgtgtcaataactgggatgcaggaagtttattttagagatgatcccaagaaataagagtgacagaatgaggagagtgtgttagggaaggagaaaatctaattcagggaaggaagaaagccagtaaagggtgcattattgaactatttattgctgtaaaaccctggggcacatattgtaggaattccctgagaaaccatgttgaaagcttttcagaagtgaccctttgaaagactgaagactgagcctttcttctctgactctcatttctctttggtttagggttgcctccagggatgttaactcctctatgcttgaaagctgctgagcaggttattagaattctaaagaaaacctgaggtaaaaaatatgagagaatgacttgaagtgaaactacaattagaggtgggctaagaggatatgatgtggggtacaagtagggtctaatacagtgaccatgtttctggcacaggtaactggatgagccaacatacattgaattcttgaaatatttttgagacatccatgtggtgacatccagtaggtagagggatacagtctggcattcagagctggcaccacagtaatgagtttaggagccacagtctaatcagagggagtgtattagttttccagggctgccctaacaaaataccacaggctggatggcttaaaaaacagaaacatattgccttccagttctggaggctgctgacaggattgatttcttctcaggtctctccctggcttgtggatggccatcttctccctctgtctttacatagtctttcctctgtgtctgtgtctgaatttcacctttttataagaatgccaatcatactgtattagggcccacccatgtgacttcattttaccttaattacctctttaaaggccttatctccaaatagagtcacattctgaggtactgggggttaggaattcagcatagcaatttttttttgtgggggatgggacacaactaagcccataacaggtagcaatcgacacaaagggaatagataaggtgttcaagaagcatgtgtagaatgagggaaagaacaaggtttgaagggataccaacatttaaaatgactagcatttaacactaacaaaacaatacgaaaaatggaaggaaaactgggaaagtgtggcttcctggaagtcaagggcaggactgcttgaagacggatggagtagtcagccaatgcccagtgctcctgagaggcccagtagaggaagatactgtgagattgttgagcttatgggttggtgtttgaaaagaaggtgaaaacttgtgctgggagaaggagcatcttcaggacaccaccgagtaggtgtataggtttgggtgctgctgggaagaagccgcaggtgggtgaggaaagggctaaagaggaaggaaagagagcagctgactggcttgcagcagtggaagagaaaagtgtccatagctcagacacggaattcatcttagatgagtgtagagtcaccacttccacgtaactagggtggaaggaggaggtaatgtgaaaaatgattggagagtaatagggatatgagcagagctttgagggagagagaagttcgtttgaattaaactaaagtttgaagtaagatgtgataaaagagcatacaaatgtatatttaaataatttctatgttgtgaagtccaatatcacttcatcattgaaatttctcaaatctttcttcatgaaatcagtattgtcacgacatccttttaaaaaagatgagttcagtggaaatatgaacataatgtattaataaaattattgttattatgtacacacatagatgactaaaatgctgttgttatattaactcatgtccaaaaggtagcttgaataaaacatatagtgttcttcttctatggaggccttgatagaaagtatagcaatttaagaaagtgtaataattcatccctgatattttcagttagcaaagttacagtatctttaatatgctgctttatcttgctattaagctgctgtttactaccgataaacaaggcaaccagaaaatggaaaagacaaatttatgtggatataagtggtgattactgtaaactatcacatcatagactaatgtgatcatagcccccttcaaattagatactgcattttatgaatacatttaacagtgctccttaattttctctttttattcagttcattgtgctaaatttctgctggcccacagaataagaactgagcaagaaatcttcatttattgcatatatttgcataatatatgatttcatattcctcatctgtaaattgctttaatatccaggaggaagttgttttttctcatttaatataattaagataataatcttacatgccaatgaaattataaggtggtgttgctgctgagggattttagtggaaattaaactgatttgacagttcaaagttcttatcccagtttgcattttatcatatatccacttagatatcacagaaaggccctttggtcttaagtcccttaatttccaaatctgtaaattaaaagttaaacaccgctttttcctaatacataggatgaatgtgaagattagtatcttctaatagctgtggaaggtgcaatataaagacatcataatttaccttgggataaaatataagtgataatgtatgctggcacagcatgtatgcttcatattagtagtaacttccaaattcttgaaaaattataacaaaatccttgcaaaatattaccatccataaacaaagagtgtttatatccaaatggaaattttatgtactaaatgtaattaaaaatctaaaagcaaatgtatttcatcaattttctttgaggatatatgaagtaccagggcctggagtatggttaaaaaatacatctatcccctgtctttttggaacttacagagtctagtaagtgaaacagagaatagctacattaaaaataaacatataatattacatgtcataaagaaaaataaagtacaataaattactttgacaaagctatcttctggggagtggagagtgggatgagggatcatgaccagaatgagtgcattcgagaatgggaggagcagaagtaaatacagcaattgtaggtaactcaagaaatttgccatcaaaagtaagcaaaacaataaggcagtagcttaagagagatgtagggtcaaggaaacttctaagagataagagataatgttttctgctcatgggaataatttagtatagagtgggaaactgatgacctataagtctcctagggctgctgtaacaaagtgccacaaactgggtgactttactgtctcgcacacagttttggacgctaaaagtctgaaatacagttgttggcaagggccatgctcccgtgaaacctctagggtaatctttacatgccttttcctagcttctggtggttgctggcaatctttggcatttcttggcttgcaaccgcataatccaatctctgtctttgtcatcacatggcgttctccctgtgtgtccctgtgtgtcttcacatggctatcttcttaaaaggacagcagtcatatcggatcaagggcccaccctgttagttaagatgacctcatcttaactaattccatctgcaacaaccctatttccaaacaaggttacattctgagttactgaagtttaggacttcagcatatcttccttttggggacacaattcaacccataacaaatagagcagtagcttgacagagatgtagggtgaaaggaacttttaagagaaaagagacaatattttctgctcatgggaatgatctagtccagagccgatgatatagtaggagaaagaaggttagaattgtggagacaaataacttgagtaggaaagaggatgagatccactggaaggctggtcttgcaagaaagcatggaaaattcatttgctgtaatagaacagaaggcagagtttaagaattcagataaggttgggttgtagattttatgatggcaaaagtttctcttttcagtgtttatatttttttagtaaagaagaaatacatttccttccttccttccttccttccttccttccttccttccttccttccttccctttctttctctctcttttctttctctttctttctctctttatttctctctctctttctctttctttctttctctctctctctctttctttctttctttctctctctctctcccccccttcctccctgctcactctctctctcccctccctccctccctccctccctcccttccttccttccttcctctttcattctctcctttatcttttttttctttttttgtgataggatctctctctgttgccaaagttgcagtgtagtgatacaatctcagcccactgcagcctcaacttcctgggctcaagccatcctccccactcagcctcctcagcagctgggattacagacgtgtgctaccatgcctggctaattttttaaaaaaactttttgtagagatgatgtctcactatgttgttcaggctagtctagaactcctggctcaagaaatcctccagcctcggtctctcaaagtgttgggattataggcgtgagccactgcatctggccacaaatgtttctgatatgaaattcagaccaatgtcctaatcatcattagtatccttttagggcattgtgggatatactggaaaaggaaagaagtatatgaaagcatagcaccatgcttgagatacacatgcacatacttttatacattttacatttactgagcctctgctatgtggctttatgctagacactttatatatactatctactttaatcctcacaacatttctaatggcattccctggccaaaaaatgcctctttttccatatatacttatactatctaaatattaaataagctcacgtcataggccagaggctactagcgcacagtcacgtgaacaggtcctttgaaggttgttatgtagtcagtacaaagttgagaatcatagagttttacaactttttaaaaagaaatatttaggatatagattaaagaacaattaaaaaataaaaaagcaagtattttaacaattttaaaataattgaaggtaaaaatacactgtgaccaagcacacctaggttcttcataacaaacttcataggctgatcaaacactgcagtctctttgtactttaacctgggctcttggcaagaagcccagtcagtaggcattcttttgtttgtttgtttctcaaatgtagatcagcttattaataggtaatggtcttgatcatctctatcaatatttatatcaaaagaagattataaatttgaaatatgtattgcttatgatttttaactttgacttttgttttaaatgaatcgacattttaaaacaaatttgttcttctgtattttgtctttgatttaaattcactcctaatacttaagaatacacactatatgcaaagtgttcttgtctggttaaggcaataaattaattttctacatattcacataccagaattgaaatgtcagataacaagtcaagcaaaggttatacaaggaaatgaacatctgtaagaaaatgatggccgttagccgatgacatgttaatctgaatggtatagtgagaatactgttatcttcaaaataggcttccatcaggtctatcccatagacctaatttctccggagtgattatgtcatcataataactgcggattagagaggataattatagatattatttttgttgatggtattgtttctatagtcataaacattgagttctacagtgtcaacagggacataggtgagttaaaaaaaaaacagtgataaacattctctatttatcttaaaacccaggcatctctgaactaactctgcaaacgggtttgatatgatttggtctgtgatgatgcccaactccattcttcagttctgtacctatcacacaggccaggtgtggtgtttgcagacagtaatgctaaacattccttttctagtcccatttttctaatcttactctccagcattggctaagatggaggacttacaggcttctcttaagataaaagagcagaaaggacatttgagcttatcggctttgactttctgtcctactctctggatggcaaatttattttggctccatgtttgttccaagatttttctgagtatttttaaagattcaaatcctggaatcagaaaatgatacagaacaaaacaggcagtgacctaaaagacataattttgcattttaaagattgaaaactttgacataacattggtaaaagttttctttgtattaaatctcagtagtctaagtaggaagaaacaacttggagaagttgcattttattcctgttttagatactcataagaaaaatttttggtgattttattttagattaaatatttaaagtttatttagacatttagtaatattttagattaaaactctctaacttaattactatccctatgaaatattttagatgaaaactctgtaatgtggtagctatccagaatttattaggtcacctattatatcttactcatttggattttaatgttttagtctaaattttccctttacatgtgggagggtgcagttgcagttgcagttggcaagttttatggagcataataattctggccttggggaatttcttttcctgctaaatatagggtttgcttacttagttcttgtttttacagcagtaggattacagttcaaatatataataagccctcaaggtagtttgaaaataaaagtttgaaaattacagtttgaacatgtgattacacctttaatgagaaaacaaatgagaaatgtcaaaggaaagaacttaattcaatatgtgaaacatattgtcaaacttatcctgttatagaaaatctcttctaccctccttatttcttcctctctttccccctcaaattcacaaatgagaaataataaaatattgaaaacgaatccatatgaactccctattttgctggaattaactccatcgtagcaatttattcttcttttagatgagagaaatgtaggtgattaggcaaatgggactttggaacaaagcagagcacctacttatgcctgtttgttgttaaccttaaaaagactcatgagcttttgtctaagtaaggttttgcacttcttttaacatcaaaaaattgtttcaaatctaaattagtttcaaaactgcagtggaaagcatatttttcatttttagaaagataataaacatgttttgattaacttgaattaatgactggattgtagggttcatagaagacatacaaggtccatatgttgcccacacactttgagaaatacacatttaccaaagaaggcaaagtgtagtgtttgcagactttgtaagtctgcaagaattagggcctggaacataaaaatcattggacattagtaaatctgtcaatttttccatggcaccagacttcatgtcttgcaaatgtttcttctgtctcaaatacaaattgaacatttctttatggttcttaggatattaggatttattatttttggattgcaagtttcttgtgtatttaaaccattatcttttcctgtaaaatctatccttagttttagtttatttttgtgtaaatcatactttatttcaagtgcattgatcctcattaaggcttgaatacaagaatggcttatatataaatgtaaaaccacaggtaccaaatattggtttgtcatttgtttgtgcccccccaaattttttctcttcctgaagtgtaccaaccaaaagtatcagaacaggaaatagaactggaaaacattaaaacagtccatggtaaaatgaaaaattccacacaggtttaaaaaaaaaaagagagagagcagtgttgtctgcagtaggttccctagacctgcagagaactaattttccattctagagaggatgtgctacctggcttgtttggtgttgttatgtgcgtacagacgagcaagtagtgtcacaatgctgtaaatcatgttcaaaatgacttctcaacctggtttggccagtttgaaattttagattttcttgaatatatagcttataaaatgctttgatttatgttatcttaactaattcttgtaataacctcctgagatacacagaattgttaagagactcaaactatgaatattacaaagctgttcacattgtttcagttagaatcagaactcaaatcttcattcttatttcattgttctttccacagcactgtgctgccaggaaaccttgggttaggatagttgatgctcattccttagagaacataaacctcttttaaacagggctttatgatttaaccacaagttacagatgagtacctaataacagtgagagtaaacatgtcatttcacaaaggtgttctgcagcaagaatgtgatgtgaataaatatctggaaaatactgaaactaatcaagaaaattcttatatggatttaagctcttagtagtgcatatactgaaaagagaagactttttctgtttgctttttaaatttccaatagtctcacttaaattcttaagttaaagctatttgcaaattatgtaaaccaaggatatcattaacaaaaataaaaaatgaaaaaatgcaaatagagcttgatcagttatcattttttgttcttaatttttaatatttttagcatgcataaagtttctgaggttaggagatttgaaggaaaagaaggaaagggaagaaagggaagagaagaggctgtaggttcctggtactaaggggttgagaacccaggggagaagagttccttgtcatagtttcatttcataagtttgtctaaggctaggctttgtactaagctcttatcttgaaagcaaaatttttaattgttctcacatgattacatttcccagcagctcaatttcagtcaggctttcggactctgatccttaagagttgggagagtggacatatgggaagtactctcgtggagaattattcatgcctgctgttcagcttaccccatgctgcatcaaagacttggcgttattgagaattcagagtgaaaggagttggatgcttttctgggcttcgtaagacatttattttaaataaatctctgctttttggttagctttcggtgataaagaagcatgccagccacgcagcatggggtcttcctgtttgctgctcaggactttcttctcatcaggtacagggagacaatttactgagccttattctctctgtccccatttagagtctactcaaactttttccatcatctacattttgataactttttattcctttaagtaaaacatgccttttgaaaaaatgttaagtacaggccgggtgcggtggctcacacctataatcccaacactttgggaggctgaggcgggtggatcacctgaagtcaggggttcaagaccagcctagccaacatggtgaaaccccgtctccactaaaaatacaaaaattagctgggcatagtggcatacgcctgtagtcccagctacttgggaggctgaggcaggaggattgcttgaacctgggaggcggaggtcacagtgagccgagatcgtgcccactgcactccagcctgggcgacagagtgagactctgtctcaaaaaaaaaaaggaggatataaaggaaaacaacacatttttctccacagagaaaggtattgttcttccccctttgaatcacctgtcctcagacctacttcttacatttacttcttaaaaggaaaacattgtaaacaacttggcacatattcctcagaactttgttaatgtacacacaaacacgcatgtgcgcagctgtttcattgttttaaaacgtgttctgcctcattttttttaattaatttactcagtatatttccatgttagtatatataaaatttcccaacattctaataataattttaaaatttgtagaattataaagcataaaaaccatgctgagataatgctgggtgagctcaggtgaaacagcagcataaagggtggggacactggttcattagaaaataattgaagaaaagggatgaagaagaagaactaggaagaacataggttagtataatttccaatttcactttctcaatcacattgaagtcataagggtgttatccttgaaacattgactggtgtttattttgtcgtggtgaaatggaaaaagacaagtttgggcttctgttccggtctaaatatgttacttggccatactgcttaactctcctgagcattcttttccttatcccctaaatgacaagattagacttggtgtaatttatggatctttccatttccgattagcacttcaatttcctaggaaaaaacctgagttttgtaaggtataaagtagtctttgtcctgagatattcttggttgttcttgtccatttcccattggccctttgctaggcctattacacgggtcacgttaccctaccattccagcatatattaacacctgcattctgctttagagttgataaagagatttcacatactttatcacatctgattttcacaattattcagtgaggtaaattgagcaggtattattttaatccccattttagagattaggaattaagttaagaggggccttgcagaaatctgattcctacctctactgtctctggtatggatggctgaatagacatagatggtccagatagaatcattatcttggtcttatttgagcattttaggtatggcttatttgtaataatgaggactaaatattgatactgataatacaggataaagaggtttaaattcactgaagagattttgttgttgttgcctcagatgatcataaggaatctttggggacatcattagacaaagacttggaactttgagacttttcctgattctgccagatgctgcctttctattccagattctccaattccaagaaaccccttgcagttctctttattctctcaggcctctcaagcattttattttgcattttcttgtcttggaatgttcttccatttttttttgtctttctgtcaaacttctacttatccttaaagctcagggattacctactctgtaaactatgtgctcactatcatctgcagacactagtgctcctatctatctccaccgcaacatttaaaagtcttcattacagcaaccatctttcaccttcctccaacctgtaactacaagctacttaagagtaaaagaaggagtatcttctcattcttgtattccagacacaatggactgtgatgcaaacgctaaaaatatgtattagtgagtaaattaatttcacagaaaattatactttttgtaaaattttagatttaattttaatgtaatttgttgcaggaacgttctcctttcctcattagtattcaatgtttaaattttaaaattatgaggtacttacagaaaagtggccagcacagtaaaaatacttttattccttctgatccattttagagtaagttgctaatctcatgttatcctggaataatgtaacatgcatttctgcatttttggaccattcccttgctttcaagcacaaggtgatattccaggttcatcctgttctttgtctgcttctggaatcagccctttttctaaggggctctggttctgtttagtagaggatagtaatatttagaagccaagctcagtgccctagttatgctctttgctattagtgtcattgttctcagaccctgtcagtggacagagctggtaattattcataactctctctctctctctctctctctctctctctctctctctctctctctctctctctatatatatatatatatatatatatatatatatatctgtttctacaccgcaaaccatgaattgatactgatctctccaattccaacctaagaccagagggttcgttcattctagttttctccctctccatatttgcaactcccttctgtgataacgagaaaactggctattataatctaatatatttacttatttaatgaatccccttatgtataactaatgtatttctgctgccatcctcttccccactgattccttccttatcctctttgggttctgacacaccgtgccaggctgccatcctcactgcacagactccgatacctcatgctactgctcttcagggtcaccttcctcccccttgcccatctctgacattctgttatgaccacctcaggcctgactgccttcatcaccttctcaggctctgactctccacactggctgactctttctctctcccctagatccatggatgcttcctagctgtgctcagtctctggcacccaacacctggccactactttggtgggcaccctactcttccagcttgggctctgacagatcatgctgggaaggatgctctgctgatcatacttgggtttgatagtcagtgcttgtgcacacacatacacccttatcccattagtgatgcagctctgatttcccatgtctcttcccaaatctggacaccttcaggaccctgcttgggctcctactgtccatgctatgttctctcctacttagatatcctttttttcttgttcaagctccaacacccctctttgggccactatggctcccctccacacagacactgctatactccacctaacgacttccaggctggatggcaaggaagagaagggaagaagagaaaggggtgtgtcatcttttagatttccttattagtccttccacagagaaaatgcatgcatgaaaatgtttacaagaggccagtttgctttatatttgcgatagtcacaaaagatctgaactgagaaaaaactgaaatcattagagaaagtaagatttgaagttaactgtcctttcacttggggaagtgaagtcttatttcttttttaggggtttcatgttttgttctgataagtgacttccaaattagacacttagaaataaaaaggctggaatggagacttgatattcttctgtcccaattatcttgttttacagacaagggaattcatcctggtgaggtcaaatgagtttcccaggtttcccaagtgcctgagtcagaaacgtgacatttttcaacatcctggccagtgtacttggcatgctaccctcattatcatttaaaagtattcgacctttaaggcaaatttctaagaaaaatatattttatacattatacattatattttaaatgggaagtgtttttcttttgtaataatatgacttatagaatttggaccctaaaatttatctggctaggtgcagtggcacaggcctgtaatcccagctgttgaggaggctgaggtgggaggatcactcgagcccaggagctctgggatgtagtgggctgtgccagtcactaagtttggcatcaatatgatgaccttcagatgtggggtggtggtgactggggaccaccaggttgtctgaggaggtgtgaactggctcaggtctgaatggagtaggtcaaaactccgtggtggtcaatagttggattgtgcctgtgaatagccactgcgtcctagcttgagcaacatagtgagatcctgcctcttaaaaaataaataaataaataaatgaaacattatttggttatgagttgatttgaaatgcttgggaccagaagtgtttcaaatttggattattaaagatttctgaatatttacatatatataaaatgagatattttggggatgggacccaagtctaaacacaaaattcatttatgtttcatatacaccctataaacataggctgaaagtaattctatataatatttccaataattttgtgcacctgtcaaatgaggtcaggtgtagaattttccattggtgtcatttcagcactcaaaaagtttcatattttgcagtattttggatttggaatttttgaattagagatgcctaacctgtagttctttggtgattatagtttattagactggatgatctagaaattagccttacctatttggtagttagtaacctgaaattttctgaacactttctcttaattgcattatgttaactgggcttagtaaagttggcatgcaggttggtcatttattttactgtttcttattttgtggacttgatgggctggcgaaatgtatgtgcatagacatgaatgactgataaatagataaattatatattctaaaaatcccacaatgtaagatttgtatttgtatttgtattattttcttttttgaggcagagtctcactctgtcacccaggttggagtgcagtgtcctgatcttggctcactgcaacctctgtctcctaggttcaagcgattttcatgcctcagcctcccgagtagcaaggattacaagcgtgcgccaccatgcctggctaatttttgtacttttagtagacacagggtttttacatgttggccaggttggtctgaactcctgatctcaagctatctgcccaccttattctcccaaagtgctgagattacaggcgtgagccacagtgcccagccaagatttgtatttttaaaaaccttttatatttgttaaaatctaacactttatggacaaatttagttttagaaaagctggaaataaacaacttgctgggtatagattagccatttagagcattcattaatttccaaaaatcattttgcatcacggaggtccaaaggaaaaataggcaacaaactatattttaaaatccaatgaaaggcttgaagagtcccacgagctgagtgatttaagaggacaactgtgatattaacttacttctggcccttagatgaaatatttgcccttttagcatcaacataattctgtaaattattattaacaaatacgtagattttataattggaaagagcacagtattaagatcatttagttcatctcccttcaggcatgaatcctcctaccacctactaaaggcggtcacccaggatctgttgatttgaatcacttttgatcatggagaaatcactatcttccaaggcagccatgccttataattccacagaaaccttcctctgggtgactttgccccatgactgctgccttctgtcctctgaagttagatataatatagttaaaccttcttccatatgacaatccttcagcttcgtctgcctagatccttagcctctgggaatgttctctacctgtctctttcttctgcagttatgtctttaggttcctcttctaagattaagattttttccctttccccatcttttcccctttgtctagacttaatgtctctttaaaatgtgctattttaggaggctgtgcattctcctgatgaaaggcaagaacggcatcttgtattctttttattgtccttagtcacgtgaatgcaaaatgtctgagacaggtctcagtcaatttagaaagtttattttggcaaggttaaggatgtgcccctgacacagcctcaggaagtcctgagacatgtgcccaaggtggtcgggggtacagtttgcttttatatattttagagagacatgagacatcaatcaatatgtgtaagatgtacattggttcagtccagtaaggtgagacaattggaagtgggggcttccaggttagaagtataatagacaagagacaaaaggttgcattcttttgaggccatgatcagccttccactcaatagacagtttagtctggcccagtgaatctgcattttttgcataaacgatggagaagagaaagcaatcagatatgcatttgtctcaggtgagcctcagagggatgaatttgaatagaatggcaggcaggtttgccctaagctggtcccttcttgatgtttccctttagcttggtgattttgaagtctcaagatttattttcctttcacagccatctaacagtgaagcatggtttcactttacacttgaaccactatatccaccagatacaaactttgcctcaaacaccacactcactttacacaaacctgttgacatcacacctaagtcagcttttcttgagctcccatatgaacaaataaacattcctctgatctgcggatatcccgccaggaagggccggcttgggcagtgctggctcagctagcccgccaccgctaccattggatttcctctttctcctctgattttaagaagtgagaaaaaaaagcaattcctgttaattatgtagacaatgcaagggtctccaggctccatttcagcaagttggtttcatcaagatcacgaaaagatgcatgcgtccccgagaccagagaggagttagggaccccgacacggaggtggcatcaggtaaccctcaggagtgagggtggggaagagggcatggctgatgctgggaatgagcagcgcccgcggagggaaggccggcggtcctgcgccccggcgtggacgcgcgcgggagttcaggctggggaaatgggtcaccacgtgctacggaggcggggacagggccctcctccccttatttgtaaagagcgccggagcggatcgcggagtttcaccgcggacctgtcagagatacagaggttgtgggggcgggagacagaaagagagagagatccagagaccgagtcttacgttgacacgcagagagaaagacgcagagacagacaaacaaacagataggagaggtgagaggccagcgagtgcttccgattaacttgccaagctcagagaagatccggggagagggagggtcccctttaaacgcgcaatccccaggactccggaagagcccttttctgcagctccttggggactgcacgtctcacttctaagtttgcggcggagagaataaagcagaaagacaggaagaggaggtggagttctacagttagtgtggttttagtttttcctaagaagtggcgtggtttggggctttatatccgggaggagcatatgtacgcaaatcctggggcgtttgcaaacccggatccggggcgtctggccccatgcccggccgggcgtttgagggctactgccacgcagcgtttctggagcctgccggctggtgccctggtggcctttatctctgtccccctttgtcctctttatctcaggctctccaggaggccggggggcccactccgcctatcgctcccctcggctacgctgccacttcaatgccccgcaggtcgcgagctgctgttctttcgaaggcgtcggagaaccaggggcgtcccgcgccacctctgactcggagcagcgccgagcactgacgctcccgcccttgggcaaggacgccagtgcgcccgcgcgcgtccctctgcgcggcagcccgtcgcgggccctcaaggggaagcccaggccaggatggccccgggtcgcgcggtggccgggctcctgttgctggcggccgccggcctcggaggagtggcggaggggccagggctagccttcagcgaggatgtgctgagcgtgttcggcgcgaatctgagcctgtcggcggcgcagctccagcacttgctggagcagatgggagccgcctcccgcgtgggcgtcccggagcctggccagctgcacttcaaccaggtaaggccgccaggtccgggcagccctccgtactgtgggtgtccctagacttcactttgtatatgagccgtttttatttgggaaaagtgcaggagaaagaatcttgttatatttctcaagtagaaggcggtatctggtgacacttgcttttcactagacgaggctgaaggattaaaaggttaacgttgttaagggatttggcagccggaaactgcagttttacgcctgatgaactgagaggtccgactctggtgattttaacattttatagaaaactttatgaagtagttgagggtgtgacgccactttaacagatgctttttagataggaatgagttacttaaatcttgccagaaagataacggctcgcacacttcctacaaggttagcaaggaagattatcacatgccaccctggttaacagttgcccggtgcgtaaccagtgctatttgaaaacgagatataatgtagttctggctcctgtgtacattacatgaggcattcagggctgaaacaggggcggccttgagactaagattctaatttggtcatccagatggtggtagactaggcttatattgttagttccttgtcatatgtcaggtcaaatatttgattctagtatttatccaaaatgattaaaaaaattttttcagtaataaacagggtactactaggcatttggcaataccttgggtttaagaacaagcttcaaactacgtaggagcagttaaacatcatacctctttgtaaacataaaatcaaattattcctaattatttctataataaatactctgtgattgggtagttcttaaaattgttaagtagacaaagtgtagtttctgcatccttccaaaactgctctccgtcttttaaaactcagttaactcagtgctttgacttgttttcctttactcctgtcccactgacagctgatattggagggtagaatacggtattttccatatcgtttgtcatttttggacgatgttagtttgttacaagaagtttttggggtccaagatgtttgggaaatgctgcatattatactctgctcttggaaatttggcgtttcctaatgaatatgactttagattacagttagggaaactgtaatcaaataaattccatgttaataacattatacgtagattgatctttttgttagaaatatcttaccacaattaaagtatatggctcttaagaaaagtagaactttctgatgccatggcatgtcagaggtggtctctctttgatctagaagggttttgtggtccccttatgcatgttctttagtaaattgtctataattccagttctgggcatggtattttatctggggtaatatctgagaaatgatgtgttggaaaaatggaaatgcccacaaattatgctaatatttaagaaaataaagtgtttgctggctagttgcattcttttcttatcaaataggggaaacaactgagctgactccagtatttccaggtaggtatggtcacgtgcttggaaagaagtttagaggattgacttgaagctgcatatctgtagcccacacattgttttgacttgcatgacctccttatcttgcagtgtctggaggtgttgatgaattttaaaggggcaaaagacctccccacatcacctttgcaaagacattggaaaacatgcctaaattatttaggaaaattggttaagtgtaccagtaatacgattctctgtttattagcaggcaggatgtctcaataggtaaaattatatgtatcttgacacctgttttctcattctcatgtttgcatatttaactgccctcattatggcctctgtgggcatcaaaaagagacaggaagaagcccataattaccttggaaagaaaaggaagccaaggaaaatttaccacttaataagcctaacaaacatctctttgatgttcttgctttttttttgagactgagttttactcttgttgctcaggctggagtgcaatggcacgatctcagttcaccacaacctccccctctgggttcaagcaattctcctgcctcagccttccaggtagctgggattacaggcgtgtgccaccacaccgggctaatttgtatttttagtagagatgaggtttctccctgttggtcagtctggtctcaaactcccgacctcaggtgatccgccggcctcggtctcccaaagtgctgggattacaggcatgagccacggtaccttgcctgatgttctaaaaagtcctaatgatgacaataatcattggttaaatgatgacaaatgaaataccaatctaaaagaatccattgatttgctggtaagtgatggacttgagcccacaacattcatgtatgctccagtgtgaaaccacccaattctggagtaaaattttagggtcattaatgcttacataccctgaggaatacaacttcagtttcctcacagggtggaataaacaatgcacatgtctattgtgagacactggtttttggctttgaaaaaggctaagaagataaaatttgtttcaaggtccaggaatttattgaatcttctacaagatttagttttcaaataacattgttcttttggttgagggctgtgatatttattaggtcagcttttctcaggtaatagactaatgaactctggagatttgttagacaattttggaaggttttctaaatatttttcttcgtatccttaagtaaggactactaaattagcttgttgctttgggatatcaaagaggtcagagttcaaactgtagacagtagaacaattgagccaatagttttgcttcttatagctactgacagtgcgaagagttaggtagaagcagtgaccaaaacaacaaagaagagggagcccttttagccaaataggtctctggggccctcatttctggataaaggtctgatctattgaggggagttcctagaatacacagggaagccccaaatatctggatacccctgggttattaatctaggacatttaagaatggcctcagtgctgccttttgtttgttcagctgttcctttctcattcttcaaatgttccttttcctcatttcctctttcaaacactgtattttcaagttcttatgtgtagatagtggttaaacagcctgataaaaggaagatcctattttctaaattatcacactgagctgctggaaatgcctccattcagaatttcttcttctgatatatattttttgatatatatcttgcagcccatctcctgtagtgcacatagtttttttcttctcacatttctactggtaaccaagttctgtttttaacctttttcagttcatattcagtcttctcaaagcaacactctttcaaaaagcctccatgaactgtctcagctggcaaactctaaatcttgagcctagcatttaaggcctgatcctcctgtgtcaacctacctctccagacctagcacccactaaactaaactactcactgctctatggattcccataagcttttgctcaaccacttcttaactcattatcttccttggacctttcctgcctttgactgaaatgttcttcttttccttgaattgccctgtgaaaatctactctcttaagcccagttaaacttcaccataaaacctttctggggtatcacagccagcactgatttactgatttctctattttctgaattcctgaaatattttttaccatgctgatgtcacttctattcctgtgttcagcagacattttaaatgactgctgcactctaatttgaatggttatttaaaaatacaaatctgatcatatcattcatcctgttaaacaattcagtgacttttagataaactacaaacacttagagtggcttcaaagtccttttctgatttggtccctgtatgtttcttaaaccgtatcctttgtcacagttccaatcttaatggaccatttacactgcctggttctctagaaatacctgattatgctctggtatcagtttagacattacttcttctgagaagcctttcttgatcttctcaagagtgtagtcgaagtcccttcaatgcaatcctgtatttcttggtgcttgtgcaattataacatattatatattgcaattatattataacatgtaaattattttatatgtattacagttttctgcttatgtggctataacccctgctgcctctctctaccctccaaaagatttttaacaagttgaagggcatggtctgactcctctctctagagactagtgtagtgcctggtttataacatgtattcattataatttttttgaatagatgggtgaagatggtttaagatgagtttgataatttgagtcctcacatgactttacagtctattggaggagacatgacatatgcacatataattataatgcacgaaacagtgatatgcctgattaaggaactaacccatttatgcctgaggttgcaattttttgaatttttgcaatcagaccttggcaatgaccttgagcagtgggatataaataactcccacatgcttagtgtttcaataatggaacactaggaataaatgtgtttaaaaaccaatgtgagataagacctgtgttttcagaacattaatctgacatgagagtgtggaatgtattggagtgggtcaaggtgggagctaaggagccatctgcagtggatttcatgagatgtaaggaccacttgaatttggagaaactcagaaggtaatataaaggctctgccttcagagacttcaagaagagcaggcatggctgaagagtatgcaaaaggccccaaagataagccttttctatttcaatattttgcctgtaatcattatttatttaagtattgctagatctcttccttcattatcttctgaccctgtgatgccagaaggagaaagaataactccgggctcatattaatggatggccaggctagtggtatgtagcaaaaaggagtgtatgtatgtgtgtggatactgcaaacatgttttttgcattgcctgttgtcatctactgcactttttcctggggtgggggtaatgatgggttagatgagggtgtttctgggaagcactgactatggacagaagagataaagaacatttgttcttttttttttttcccctttatgtgctgagaaatggtgggggtaaaccttctaggaatgccttctaacctgcttgttcaggtgagaaactggaagggcaggacagagggtgaggttacctaggtctcttgttaagaatcctccaagacaatggccccattctgatctattagatcactctcacataagttgattgtgtacagtgtgttgattgtatttcaaggctttgggaaaatgagggacattcgtaattcatttgactgtgatgtcaagagcttagtttgccttgatgccaggtgtgattgggatccattaggaaaatgcttttcattcctttcatatctaactcccaaaatcacatctttacccactattctaggagtcatatgaacccttttatatgtaatgtaataattatagctaggatttattaatcttttactgtgtggcattactcccttaaccaatttatttgtattatcatgtttcatactcataccaactctatgataaaggtcccattattatcttcattttatgtgtaagaaaaatgtggcacagagaggttaagtaactggaccaacgtcacgaagtaagtggtagaacctcaggcagtcttacacactatgctatagtgcattttttgaattacaatctagaaaaccatactttctctagctagagcaaccatgaccttagattttgaactacagggagaagttactagtcatcgactgcctatctggttacattgcttagtcacattaaggaaatggtactagagctgtggaggctacgatgatgatgacttgtctttgtcctcagagaccttataattaagaaataagatggaggctgggcgcggtggctaacgcctgtaatcccagcactttgggaggctgaggggggcagatcacaaggtcaggagatcgagaccatcctggttaacatggtgaaaccccatctctactaaaaatacaaaaaattagccgggagtagtggtgggtgcctgtagtcccagctactcaggaggctgaggcaggagaatggcgtgaacccgggaggcagagcttgcagtgagccgagatggcgccactgcactccagcctgggtgacaaagtaagactccgtctcgaaaaaaaaaaaaaaaaagaaataagatggaaactgtgaaaagtgactatggaaggcaaagctgcagtaatcacgaaagcagacattgtaaaacatatcacaaggccatatatgattgtcacatggatactagaaaacatctgctactagtttagaaaggtgagggattttttggggttggaaatgcctcatggaaaagttataactcagtcaatttggcttatctggtttggtttttaaaaaatttattgattgaactcttgcttataccaaatgtgatgaattttcatgtgaattacatgaattcttttttagaggatgaaattttcttttattgtttcatatataatgaatttttttaagggactatattttgagcaacaatagtactttcttctatggatagacttcaggcatgtctagtatgaaacctttcagttcatttctcacttttatgctagaagttttcggccaatgaatccactgtctcttctggcggtttagaatggaaatcttcccttatgatgcctctgaagcaattgcattcttaactgcacaacactggagaaagtggtttgtgcataggtgttggggaatgagttgaagcaaggagggaagagtaggtgagccgagccaagtacttcaacagaatcactgactcttaactataggtaagacagtgctgctaggaggcagtttgagctttctcacacagttatcaggtgaactttccataattgggatagatctttctctctagggatgttccctagggttgttctctcatctgggtgggagatttgcagctgttatgctttccatgatttattcttatcttgggatatattgaggggcagggacttagttttctgctttctagtcataaaaacctattacttttcaaccataataattgtttaaaggtgttttctttaaatttaatatacttttgattctttttttttttttttgagaaaagtgaattccttttggtggtagtagggattgggggagaaaaataggaatataaatagaaatggaaaataaggcctgaagttgagaaggatcagtgatcctcaggaaaagaaaagcaacatctaatgaaggcaatttaatgtggctggtaatgggtttgcaagttacttgtattccaagtggtgtttcctcaagggatgtacacattactaagtgcaaacagctagtattagggtcatttacaatgcaatttattttaaaaaaagaatgttactaaactctaggctatctaaaaaactaggtaattttcagaattttcccatttccaactttatataacagtagattcctgtttgtaatcaaaactaattaatttattctcaaattattcccaattgtctgtttcagtagccttgagatttattttataaagaaatgaacctttcatcgaattacctttgtgttgataggatttgggagcatagaaaacattcagaatggagccttgtttaatttggcttccgtctctttctaaagatactctgttgtttttcctggcctgaagtttaaggagaataaaaacaaaaatctgttgagtctagattaaaggtgaacctgaaatgtagcattatgccctccaaggccaaatatttaacaccttgactttttttctttaaataactaattgaatagctagagaaaaaaatcaagtgagcattgataatgcctctaagtctttagttctttgaacctaattaaaaaataaaccataattgtaaccaatttatttggtgagcttcttagacctctaactatcttagagaatacagcataatggtttacaatctggcttctggagtcaggcaagcttgcgctgaaattctaattctcttgtttaccacctgggaaatcacagccaagtgacttaccctctttttgtaatccttagttttcacatccgtaaattgagaaaaaaagagccttactcataggacagttttttggactagaaaataagaacaatattaacatttattgagcatttaacatatttcgggcacttatatattcagtatgttatacgtgccaactcaataaagatataagacttttttccattacctatattgcttccaataatacgtaatacaaaagacaatgtatgtaaaatacttagcattgggcctggctcaaattatgtgctcaatgcatagttattatcatcataatagtatgttactcgatatagctacattatccttaacaaaattgtcttccattgatgatctgaacacccaagcgtctgtcaactaaaagaagaaagcacagccatgaaaagacagcaagaattaatgaaaaaaaagatcagtgagaaataagtcagtccagtgcctttgatttcagtcttggtttccatggtgactcaccttcagagaggcttttacagtttacctccacttccctttctccaaacactggtagtaaattcttgaaaatgtaaaccttaggagtagagactaataaaataatttgagtacttcaatgtgcattgaaattattacctcccttccagaggacttctgatgctacatttagaagttggctttattttattatttttgccccagattggcatcaccactgaaatgtgaatgtttggggaaccatataatacttccagaaatggatagaattgcggttttaaattgagatctacttctaaatctgtatggacctctatatgggttttgcaagccgaagaatccaggaccctctgcatttagctgaaccctgttggatagaaaacagataagagaatgagcattattttagtctaactggaagaagtgagagatgtatctcttcagcgacagggaaacagaaagttagcccgaacttcagcgaacagtaaaatcagtacaccgattctgagcttggcaaaagttcctgctttatataaatattcatcatatgttctataaaacatgcagtcccttatgttaagagatgcatgctatgatggtaccaggtaatagagtttgaatgttaaatcataatgctctacagttttcttcaggagcagagttccccagaacgtaagtatattattcggttacttcacctacacattagcatgaacagctagacactggctctgtctctagtcttgggatgaacgctgtttaagtaaatgttgtgggtagggcctttactgtggcagaggaaacaggtcctgtcctagtaagaatatttactaacaattacggagcacttcttgtgttccaggcatcctgctcagttcttctttatacaccattctgttaaacctcctgatcccatggagtaaacactcttgttattcccttgaggaaactcaaccttaggtaggttaagtaactcactttaaatcagatgactcatattggcagagcacatattccattccagggtgactggattctataaccgatgcactttccactattgcctctcatgctgaagagtatcatcccacagaaggacttattttccaaaaagccaagtgcctcttgtgtcatccaagtgcctgaatgtcaaggtagaactaatgccattttcttgaagccactgggaactgtacaatcatttatttgaagctggcatatgttctctgctgatgttcccctcttgtttgagtgaaaagagggaaaaaatgtcttttcttccccttgttaaagttgtacttgcaataatcagggccggccctaaaactcattattacttcctctacaaactagtttttaaccttgcaaagttatttcctgacaattaacatttgatactcgaaacaatattgtgagaaaattgggacatatcagttcccccagaaactgagatacgaataagtcatttggtaaaagttagacaaagtccccagatttttctgggagaccagacattccaattttgaatcctcagttctttttccttgggctaactttaatcagatgctgtattagcaaggccacggtgctctgactaacctgaatattccatgatctttgtgtttcatttactgtgtataactggaccatagaaaggtgcgaatgcctgttctgttttctcacctctcagtcactattcaaaccattggttctggcttttttctgtccccaccacttccctgaaatttataccaagtcacatggaaccaccttattgttaggttcagtgggtgcttctcaggcctcaccgctctgataattttgttggtgttgattacatcctacctgaaacacattctttccttgcttgcagctgtttgtgccatgtttttcttacttctctggctgctgcttttcaattttgatttcctttgctcattctttaaatattagtgctcctcaggtttccatctcgagcctgttttattttgatgtcacacactctttctgtatatcttcaaggactcatatggctgtgattatctatctgtagatgctttctacatgagttggcttacttcagatttctctcttgagattcagccttgcgcacccagctgacaattgatgtctaactcttttcttttccccaactcaacaggtctaaacctgtctcaaacaaaactcatcaactccatctctttctccatcaaaaccttttggtattcctgttttgcccatcttagtgataggtattactatctgctcactgaactaagctgtgaaactggatgttaatattgactcctcactttttctttccccttcccatatcaaatgcacataagtcttgtcataataacttataaatatctcttagttaatctcttgaagctccaacatcctctttgtgtaatggggaaaattgtacctaccttatgggattgtagtagagatgaaatcagataatatgtctagccactctgtcttttgcctggcatgctgtaagtattcaatacacatacactctgttactgctgccgccctctgcatccagtcttgcctcacatatctctttcctctacatttcttccagtcttgaatacatatatatgtatatatatacacattttattattttattagacttcaagttctgggatacatgtgcagaacatgcaggtttgttacttaggtatacgcgtgacatggtggtttactgcacccatcagccattatctacattaggtatttctcctaatgctatacctcccctagccccgcagcccctgacagaccccagtgtgtgatgttcccctccctgtgtccatgtgttctcattgttcaattcccacttatgagtgagaacatgcggtgtttggttttctgttgctgtgttagtttgctgaggatgatggtttccagcttcatccatgtctctaaaaatgacatgaactcatcctttttttatggctgcatggtattccatggtgtatatgtgccacattttctttatacaatccatcattgatgggcatttgggttggttccaagtctttgctactgtgaaagtgctgcaataaacatatgtgttcatgtgtctttaaagtagagtgatttataatcctttgggtatatacccagtaatgggactgcaaaccatcaattggtatttctggttctagatccttgaggaattgccacactgtctttcccaatggttgaactaatttatactcccaccaacagtgtaaaagctttcccatttctccacatcctctccagcatctgttgttccctgaccttttactgatcgccattctaactggcatgagatggtatatcagtgtggttttgatttgcatttctctaacaatcagtggatgatgagctttttttcatatgtttcttggccaaataaatgtcttcttttgaaaagtgttcttatcctttgcccagtttttggtggggttgtttgtttttgttcttgtaaatttgtttcagttccttatagattctggatattagccctttgtcagatggatagattacgaaattttcacccattctgtaggttgcctgttcactttgatgatagcttcttttgctgtgcagaagctctttagtttaattagatcccatttgtcaattttggcttttgttgccattgcttttggtgttttagtcatgaagtctttgcccatgtctatgtcctgaatggtattgcctaggttttcttctagggtttttatggttttaggtcttatgttcaaatcttcaatttattttcagttaatttttgtataaggtgtaaggaagggatccagtttcagttttctacatagggctagtcagttttcccaacaccatttattaaataggaaattctttccccattgcttgtttttgtgaggtttgtcaaagatcagatggttgtagatgtctggcgttatttctgaggcctctgttctgttccattggtctatatatctgttgtggtaccagtactatgctgtttttgttactgtagccttgtactatagtttgaagtcaggtagcgtgatgcctccagctttgttctttttccttaggtttgtcttggctttatgggctcttgtttggttccatatgaaatttaaagtagttttttccaattctgtgaagaaagtaaatggcagcttgatggggatagcattgaatctataaattacgttgggcagtatggccgttttcatgatattgattcttcctatccatgaacatggaatgtttttcatttgtttgtgtcctctcttattttgttgagcagtggtttgtagttctcctagaagaggtccttcacatcccttttaagctgtattcctaggtattttattctctttgtagcaattgtgaatgggagttcactcacgatttggctctcatctgttattggtgtataggaatgcttgtgattttagcacatcaattctgtatcctgagactgctgagttgcttatcagcctaaggagattttgggctgagacgatggggttttctaaatatacaatcatgtcatctgcaaacgagacaatttgactgcttcttttcctgtttgaatacccttcatttctttctcttgcctgattgccctggccagaacttccagtactatgttgaataggagtggtaatagagggcatccttgtcttgtgctggttttcaaagggactgcttccagcttttgcccattcagtatgatattggctgtgggcttgtcataagcagctcttattattttgagatacatcccatcaatacgtagtttattgagcgtttttagcatgaagtggtgttgaatcttatcaaaagccttttctgcatctattgagataatcatgtggtttttgtcattggttctgtttatgtgatggattacgtttattgatttgcatatgttgaaccagcactgcattccagggatgaaactgacttgatcataatggataagctttttgatgtgctgctggaattggtttgccagtattttattgaggagttttgcatccatgttcatcagggatattgacctgaaattttctttttctgttatgtctttgccaggttttggtatcaggatgatgctgacctcgtaaaatgagttagggaagagtctctctttttctactgtttgggatagtatcagaaggaatggtaccagctcctctgtatccgtgaataccgatacagagctgtgaatccatccagtcctggactttttttgattggtaggctattaattactgcctccatttcagaacttgttattggtctattcagggattaaacttcttcctggtttagtcctgggagggtgtatgtgtccaggaatttacctatttcttctttattttcaagtttatttgcgttgaggtgtttatagtattctctgatggtagtttgaatttctgtgggataagtggtaatttcccctttatcatttttaatatgtccttttgattcttctctcttttcttctttatttgtctagctaacaatctatctattttgttaatcttttcaaaaaaaccagctcctggattcagagattttttgaagggtttttttgtgcctctgtctccttcagttctgctctgatcttagttatttcttgtcttctgccagcttttgaatttgtttgctcttgcttctctagttcttttaattgtgatgttatggtgttgattttagatctttttcgctttctcctgtggatacttaatgctataaatttccttctaaacactgctttagctgtgtcccagagattctggtatgttgtgtctttgttcttaaagaaattacttatttctgcgttaatttcgttattacccagtaatcagtcaggagcaggttgttcagtttccatgtagttgtgtggttttgagtgagtatcttaatcctgagttctaatttgattgcactgagctgggagagacagtttgttatgattaccattcttttgcatttactgaggagtgttttacttccaattatgtggtcaattttagaataagtgcgatgtggtgctgagaagaatgtatattctgttgatttggggtggagagttctgtaaatgtctattaactcagcttggtccagagctgagttcacagacttgaatctttttttttttttttttttgagacagattcttgctctctcccccaggctggattgcagtggcactatctcagctcactgcaacctccatcttccaggttcaagcaattctcctgtctcagcttccgaaatagctgggactacaggcgcccaccaccatgcccagctaatttttgtatttttagtagagacagggtttcaccatattggtcaggctggtcttgaactcttgacatcaggtgatccgcctgccgtggcctcccaaagtgctgagaatacaggcatgagccactgtgcccagccaacttgaatctttaatatgcaaatctgagcatgtcactatcctcacatgacttcccattattgtgaaaataaactctaaactatttgcctggtatttacggcagaagcatctgcccccactcccatatttctccagccttatttctactttttccttcacatttcaccttcagtgctgctttctccaggaaggctttgacagtcccattacttcagagttggctaatacctctgtcttctccaaattcatggagcctacctccacacttaccagactatgctacagttatatatgtcttttttttttttttttgagattcagtctctctctgtcacccaagctggagtgcagtggtgcagtcttggctcactgcaagctccgcctcccgggttcacaccattctcctgcctcagcctcccgagtagctgggactacaggcgcccaccaccaagcccagctaatttttttgtatttttttagtagagacggggtttcaccgtgttaaccaggatggtctcgatctcctgacctcgtgatcctcccaccttggtctcccaaagtgctgggattacaggcgtgagccaccgtgcccggcccctgcagttatatatgccttaatatggactctgcaatagtctgtatggtccatgaggcaaaggactgggtttacctggaaagcctccgctatgcccataactagcataatgtctgacatttaggcgatattcaagaaatatttgttgaatgaatgaaatacttgataaataacttcaacctttttaactgataaatttttaaatgattaattttaaaccaacataaccttctaaattaatattcctttccctcctcatcatcctctaaaaggacacatgaactctctattctgctggtttaagcagatgatctagacatcaacctagatgcatcatttaatttaatttaaggtaaaccagcaattccattttttgttgccgacaatgaattaaaaaaaaaaaaacagagagataaggcctgagaagcacccattgtatttagcaatagggaggttccagtgaccttgtatagaataatttcaaggaagtggtgggaatagaagccagaccacaatgggttgaggaatgactgagaggtgaggaaatggaataggtattcatgcatttccatgggtccaattacacacataaaaaacctaaaagaatagtacattaaaatttaacccatgggccatctaaatagaaggaaataaagtttttattacttttagtttatgaactttccaggaatttttttcttctcatttagcctgggattttctctgtagcccattactatattctttacggcaacttagaaacactgatatcaggattagtttatttgtagcatcagggccacattaaactgattctaggaaagtttcatagaatgagaagaaaaacttatggctggaatatttgcctcctcagaggtcttggtagatgattcccaggttattgatttatatttctcagaattatattcaaacacagtgtgctagtttgaaatctcctttcattcaccttctttccttaatctacaaaattagcaattgtttataaattgagtgtcttatgtgtccaaggacttattaggggttgaagaagatataaaaaggaagaagtccattctctgtagatttttatgatcttattgaaggaatatccatttcatgagaagataataatacatggaagcacacattaagtgctaaacaaatagataacagggatgtctggagtctggagaagggatgggtatagcaatattaggcagtgaagatggattccaaatgggccttgcaggacagacaggagttgggtagtttgagaggagatgtatcatattctaggcaggggtcatgggagatgcaaagtcacagtgaagttacaatataaggctgattataactggttaggatagagtattcatctatccttttacagcatgctgaagggggaaggaatattagagacaggcaagtgaggttcttaagtgttaggactttagactctcggcataaatgtgtacaatttttttgagacagggtctcactgtgtcacccaggctggattgcagtggcacgatcatgactcactgcagccttgacctcctgggctcaagcgatcctcctgctcatccttctgagtaactgggactactggtgtgcaccatcatgcttagctaatttttaattatttttgtcattcaagctggttttgaactcctgggcttaagtgatcctcctgccttggtgtctcaaagtgctaggattacaagtgtgagccaccatgccaggccagaaatgtgtaattttgaaggtttttgtttttgtttttttggtatgtgtgtgtgcaagggttgcagtttgggcagaagaaggacatgctgatgggtgatgcatcagtagaaacaaccttgtggagttgtaggataaccaggatgagaagggtattggatacgattaggttagaagctcctagctcctcagtgaagtggtacataagggctctctctgctggtgtgtcatttttatctgctagattctcaaacattttggtctcaggacccccttgtactcttaaaaattattgagaataccaaagagccttaatatatgtgatttatatctattaatacttaccattatagaaattaatgttaagaaaacttgaaaatatttaatttattaaacataacaataaacccattccatgctaattttattttttatttttttgagacggagtcttgctctgtcgcccaggctggaatgcagtggcgcgatctcggctcactgcaagctctgcctcctgggtgcaccccattctcagacctcagcctcccgagtagctgggactacaggcgcccgccacgaggcctggctaattttttgtagttttagtagagacggggtttcaccgtgttagccaggatggtctcgatctcctgaccttgtgatctgcccgcctcggcctcccaaagtgctgggattacaggcgtgagccaccgcacccggccaaggtgcactcatttcttgtggcaactccccagccctgagttgaagaagcagcatgccctccacactttatcctcagaaggactgagtgggaaacccttggtgtacatcaaggaaacaaaggcttttgatcttggcaaaatgggataatgcccatgggattccctagcagatgatgggaagtagggtggcctctgccccctgaagacatgtcaggggtgggaagcgaaggatctagattgggtgtctgtgctctgacaccacaccacacttttaggagtctaaaagaacaccttctcttttcaagacaagacctcgaaaagctgaatatggaatggggtagggctgggaaacttgtccatcactatgacaaagacagaaaatgttgtaaacctcttttaaaaagattgttgtagctttcaacattctttctttttctttagtaaaatctctaagaattccagcctgccttttgtttaggggaacctggaaaaagagattttaaacaaacaaaacatgacttaattttatttttcttaaaagaaactgaaatacaagtacattgttaaaaactttggcagatataaagaagcagaaaggaaaaaaaataaaaccacacataattttaccactcagagataaacactgttaacatttggagcacagatttatccttatttatagcagcattctctatatattgtttcataataatctttttatccctagcagtgcatcataaaacaaggcatctttatcctttaaattgtatattcaggaaaagcgttcttcatcttcccttcaaaaagagttttgagagtgaacgtaagtgtgtgtgtatgtatgtgtatgcatgtgagtgtgtgtgtatatgagtgtgagtgtgcatgtatgtgagagtgcatgtgtgttggtggcatcagtgccagagtgacttcagtaagaagtgtaagaaaacctgaggaaaaatggaaaaattaatcttggggaaacagagttggggtcacttgactggccacctcttaaacctagagattatttttatagagtgttcttggcttaaaccttagaaaactgtcttttatcttgatagaataataatgagtaaactttgaagaggactttaaagaggggaaaacttcaagagaaggtggagagagagattcagcgtgtgtatatatgtatacatatatatatgtatatataagtatgtatgtatatatcagggagatttggaagtgaaacttgagtgccttgtaattgaggcagtttcattattgcaggaagaacaaatctggaagcaatttcctcagtcactcgtgctttgaatgttcctgctgtgagtgtggaacatgtaagtcaccaattccattgttcagtgagccctaaaaggataaattaatgggacggttcacttgtttcaagggtcagaagtggtctcccaattgttaaattcaaactaccattttaaatgtatgtatttcaattgctctcttgggatctttggccagttgccatattcaaaacacttttaggtatcccaatgattatttaatgggaaagaaacctctggaatcctggaattcatatctactttagtatttattaagatgattactaatattgctatgtacctggcatgcagtagtgctcggtaaatatgtgttgaatgtatgaatgagtaaataaatgaatgaatctctcacttgtcttcacagcatttttggagccaactgcaaaaatggtttaagttcatagctgcaaactaaacaaaattatgaaaaagcaaaagaaatgaagtgcagaaagcgaagtatacctaaaattctcactctggtgagaaaagttggctgatgtttgaactgtaggatttttttttttctttcttgagccggagtcttggtttgtcaccaggctggagtgtagtggcactatctcggctcactgcagcctccgccttctgggttcaagcgattctcctgcctcagccttccgagtagctgggattacaggcatgcaccaacacgctcaggtaatttttatatttttagtatagacggggtttcaccatgttggccaggatggtcttgatctcttgacctcatgatctgcccgcctcggcctcccaaagtgctgggattacaggtgtgagccactgcagctggccggacttttttatttgtataaatgtaagtacaagggcagttttgttacatgaatatattgggtagtggtgaaatctgggcttttagtgtagccatcacctgaataatacatattgtgtccattaagtaatttcttattgtagggttatttttgaagtctgtctctgagtgggatcctaaatatggtttaacagttaatttaattgtgtgtttcaactcactattaggggcaacaaagtgcattctctgccagggtctcaatgattctttcattgaatccttctcagtgttggaccaagacatagcagccagaatactggcttacaagtcaaaaggcatgagaacacatatatctgaattctgtctttaacacttttacattgtttaatcttgtaccgttagaaatttacctttctagacaggatttcttcatccaaatttaacctaaaatctatttaagtggttgattaaagaggttatacgtgttaagcatatattatggtttgctattactgtagtccttatatgcttcccagaactcttatgataactattgcttataaaatttattcaccaactaattgcatactcatttgcgttactgatctctccattaatttttttgtgtatcatgtcttatttccccaagaatcagatgcatcaaaataacaaacttagcacatgtatctcctcctctaggaagccttccctgacctcattcctttaatcacatgatatgttgtgcatatttttatttgcttatctgttttatatgtatctcctttctatgctgaatgatgagattgttgaagatgaaaaccatgtcttattctcaacacctactggaatacctgactcagagaaggtgtgagcaacctgttcagttaatgaataaatgaatgagaatgaaggagaagtggaatgggcttctataagagcagaacagatgaagattataggtggattcttattaaacctcttacttgttgcatctctttaaagaacaggagatcgccacttacttggggtgggggaaggatgggtttcatggctttcatcacagctgcatacatggcaaatttcagaaagtagctgtagttcttactgaatagcaacagctgtagcaatcactggcagggcagcgcagggtagaggtgactaaaataaaagaagctagacagagctctttcagacttggattctaaccccagttctgctgcttgctccctctggggctttgtaatggtatttaaagttgattgtcattgagtctaaatgcattacaaaaatctgtgtctccctgcctttacctccacagagagaatacaaccacacctagcactttccttattgggaatgtgagctactcagcctcccacagaatctcaatctattgcaaaacaaaatctgaaaccatttctggggtggcttttgaatgggatgatatttcatttctggtgtgatgtgaaggccttggtataatggtacaggatcagatggtcttactgtattgtattatttaatgggtgccacttgataagacaaccaagcagacaaaacagcctgtgtgtggagaacaggaagaagtgtggaagctttaaagagtggaaaggcttatctttttgttttcctataggttatgatgtagcattcattcactagcttttaaaagtgacttttaaataattactttatgtatccatcagtactcttttatttgtaagagtgaaaaaaaatcaactttaattagcttaagccgaaagggaattcattggcccacataacttaagagtcagggtgcacatcagctttaggtacagcttatccagggtattgtgatggtattgaaaatctgtctttctccacttcttagttagccttctttcacatggcggcagaaatggtttaagatgtccccagactcacagcaggactagtggagaaagagtttttcagtagcacaggtgattataggatccagactgctcctatgcttaccaaaatcacatggaaggcagttcccatggcagtaaggaggtctgttactagatgatgggacaaaaacccaagggttacatgtctttcatcattccaggaaggcaaaaaccacagacatctaccaaatttgactggtctggattgtttcttatgttttgagcttaattcactcgggcttatatactggctctttttcgtgcttttgcacaaatcgtgtatgcattctcaagcctttgttcttctttctatatgctgattctcctgatcagctccactactcccactcagctatgacctcattgcagaagaagccacatccttgtctctggtctctacctttctcagggaaagctcaccaatcatttgcatttggggtcccaggagcattgcaacttgaaatgtctaaaaccaaagttgccaccatcctgccaaatgggcttctcttcctaggttccctaatcacagtgttgcagaactttgttccttagttcagcttatactgggttcttgtcacacgaccagaaaaaattaggcacatagacacattgaagggtgaggagaatggaatttattgggcgaaaaggaaaaaagaaaaaaacgacctctcagcaaagctagcggagttcctgctaacaggcccccatctcacagattggttccaggtcacaaacacaggaactgaagagggcaggctcctgccccttgcacgcacgggaaattcccatggctccatcctattctcccactgctcaggcaggtagagattctccgaggaccctcccttttatctgcctcctgcatctatcaacagcagtagcagcatcctctttctactctcccagcattctatcgtcaatgttgtttttgactatttcctctgcatatcatttctccctcatgtgaactctcatagttctttattattatgttttttgtgaatttataatttcctctctggttttatagaccttcatgtatctaatttatttctgccacagtgatttaagtttgctgatggaaggcagttttacttatttatctttgtactatttccttcctggttgtcatcctccagctttccccactttctacttctcccatcaatattatacctagacttttatggtttgataaatatttgtagaataaaggaaggagttaatgcaatctgtagtataactacatggctactatacttgatattgttaaaaaaccagtgcctaacagcagtcgaagtggtaaaaacagatttcattcaggaaacattgcaataggggtatgttagagttctccagagaaacaaaaccaacaggatatatatatatatattttttctcatatatatattctcatatatatatactctcatatatatattctcatatatatatactctcatatatatattctcatatatatatactctcatatatatattctcatatatatatactctcatatatatattctcatatatatatactctcatatatatattctcatatatatatactctcatatatatattctcatatatatatactctcatatatatattctcatatatatatactctcatatatatattctcatatatatatactctcatatatatattctcatatatatatactctcatatatatattctcatatgtatatatactctcatatatatattctcatatatatatattctcatatatatattctcatatatatatactcatatatatattctcatatatatatactcatatatatattctcatatatatatactcatatatacattctcatatatatatactcatatatatattctcatatatatactcatatataatattctcatatatatactcatatatatattctcatatatatatactcatacatatatacatatatatatacatatatatatacatatatatatatatatatatatgtatatatatatgagagattatgaggaattggctcatgtgattgtggaggctgagaagtcccaggatctgctgtctgcaggctacagattgggaaagccaatgctttaatttagcctgtgtctgaaagcccgagaaccagaggagccagtggtgtaaactctagagggagggttgaagaaactgaaatcaaatgacccagttcaagcagtgaggaaggaaaaaagggacaaattccttcctctgccttttgttctgttcagaccttcaatgggttggactcacactggggagggcaatctacttaacggagtccaccgattcaaatgctaatctcatctggaaccaccctgcagacacctcagaagtaatgtttaacgccctagaaataatgtttaatttgggaagccagtggccagtcaaattgacacaaaattaatgatcacaaggggaaaagagacctcagtatggaacttggctcaactccaaatacaacatggacaagtagggatttacagccaaggaggagcaggggtaggagtggggagggggtcagtgaatggaaaattactaagaggaaacattaagggtaggggggattttggttaaacagacctaacaggattcttgctgaaggcaggaccagggtggtcagacatggagggtgagggaactctctttaaactgagttagaaggtttcttgctaacaccaggtgatgcaggtcctgtaaggatggatgctagggtcgaggcctgggctcagaggagcctgactgcagtttagtcaaggagagaatctttgtcagtattgaagctttcagattcagcatttattataaccagatctcaattgtgtaaaatgctaaggaaggaacttgccctaattccttgagcttccttcatcctctctctgaaccagccccccactttcccataaggacatgtttaggaaagaggcagaaaaacttctgactcataaaaactggtgaggaagaaggaagagcagaagcggaagccaaaatgcacataactatttgctgaaacggttttgagcatactttgcggtctcttttgtaatatatacctagcccctacctataatgctaccttactttggtgtttcacacatacaaggcccatttgaggtcaccctaatgtggcaagagaccagtgaataggagcttaacttcaaacttagagtctttatgaaaaatgtcaacgcgctgaacacgaggacatctgaaaccttaaaaggccacagcaaacatcagggcagcatgcttgagaacagcagtgtcatagatacaagcatgaaaagaagtaaagctgtcataaatgtgaaggagctggcgaaagcacatggagttttattaaggcagatagcattccgtacaatcatcctgaatagttttctgagtagcacttgatgatcctaccctttccgtaatttgtttgttcattgttttggaggtgaaagggtgtgcttgtgagggtgtttgagcctccttgtccatggtataaccggttggttttgttgccctcactcttcaggcgctggactctcatcctgtttgttcccactctgggaggcaccaccctttctaagacaactgctttcttttgtttctggttcaactttgttaagtcaaagtataataaatatcaagattgtttgaagccagaaataggccactgtccaaaattgtgttcattccacttgctggtagatagctattttaaataagtcaggcttgccattaattcagttctgctgcactgttcgtattctgttctcattctcttatcatgaggggagctttgagttttatcatctctacatctctgtgttcttcgtggtgattggacagttgccactctccatgactaccgtgactatccctgaccacctgtccagctaaaatttcaacacaaatgctgcacagctaagctatctgatggtattaattatatatttatttgactgcactgtttctttttttctaattgtatgtaggagggtgtctttaatgatgtacagttggcaattctgacatccttaagggtggtggcattcaagctcgtgactgccattcacagcaagaaatacattttacatcatgatccagtatacatgttcatgttatatatgatgtgtaactaaagtttggttaagcaacacttaccctattatgtgtgatatggtctatagtttctattattttgtattttacttcattaaaaaatgcagactgtgccttagcaagtgggcgtcctgattcaggaatgggttacaatttgagtctgaaaaagaactgcttaacagtcatcaggtattagggagccttagcatgctaattctgaaaagtctttggagattatctataggcatcttcccgttttcctcctattttacagttggaggaatttaaagtccaagtagggtaagtcttccttgcagggaaacagtggtgctctctgtgtgtgctatcatgtgctatcacacctatttattcctggaagcacacagtgtccagttgaaccacaagggctgtctactttttgaatctagcaattatgcttctggatgccttcctggtgatgaataaactgttcacactttcccttccccaattaaatcttgaggtattttctccctccattagtttattatacatcattctgagctaaagggaagactgttaacagggcattgagtgtggtgtatcctcttctatggatggcatgcagctatcattaatcataaactcaaaacagtgggttgaataaggaacaattttaggtacatacttagacattaaaaaaatctaaatgtgcattttctgtaaggtagttgtaatcttagcgttggacaactgcatagatcttggtgtatttgattatttgatgttttttcatttttcctttataaacagtagtgatctccttgtaacaaaatatgacattttaaatttcattgtttctgtagtaaagggaattacagcatcttatggtcaaacaattaacatcaactttgagttattgataccattcatagtgtattagtcagctcaggctgccataacaaaataccaaagcctaggtggcttaagcaacagaaatttattttctcatagttggagacttgaagtccagaccaaggtgccagaatggttgctgtctgtgagggctctctccttgggtcacagagagcattttctcgcttcctcatatagcagagaaagagcaagtgagcaggctctttgatgtctctttttataagtgcactaatcccactggaccagggccccaacttcatgaactcatctaaacttaattacctctcaaaggccccatctccaaataccatcacactggggattagggcttcaacatgtgaatctggggagacataattcagatcatagtacatagctaaggtcttattggggtttaagcattggctgaagcatgcaaataacttgcctaaattacgtttattaaagacagactcttccatttgagtgaatggatatttttcacactataattcttatgacattcagtagcatttattttatatttttcttaataatgcaagtactgtatatggaagagcttacagttaaaatgtgagaacaacattatacctttaaaaaattatttttgcagtttttttcctaatgtagattctagtccttgttaatagttaatgaatttctaaacagcccagcactattttcaaaacttaatatagaaaagttacccaacgtcattgagaataatgcatattttaatgaaaaacagtttgtgcaaaagacatattttaaaacaactttttatatttatatttattgcagtgtagagaagagaggaatttcttagcatgaaactgtagggagccaggtatttgtctacaagaaatgctatagagagccatgccagtgacacacacaaaatatccattcaaactgaagaaaagtaaactaagagggggtactgacaataaaaaattgttttaaaaccctttgtttgaatggtgttggtgcacccctattttaaataaagtccttagatatgcccaaaccaattcttatttattttctgctgtaggaaagctgttgattaagaagggatttttttttttctatttttcttgtttctaggtttaaactggtgtgggctgttttacaactttaggggcctttcaatttctgtggtgggcttttgtataaagagtgctgtgcatctagatgaaatagtctgtgtctctttatagcatctttgcttatgtgcttttacacattattatcacattttttttttgtttattctatttcagtgtttaactgctgaagagatcttttcccttcatggcttttcaaatgctacccaaataaccagctccaaattctctgtcatctgtccagcagtcttacagcaattgaactttcacccatgtgaggatcggcccaagcacaaaacaagaccaagtcattcagaaggtatattagaagcattttttctcttttatttgaaaagtctatgaaccattgtgaaatgaagttaatatgcctctttttctgctttattgcttttaattaatctacatagaacttcttcgaataatacttatattttgaaagtatttggaataagaagaattataactcatttaagcttcataagttatgctcttctctttgttgaatcaaaattacatttagtacacttaaaaactttataaaatccagttcttgattttaaacaatatatattttatgctgtgcatattggattgcattttctttggcttataattgatcatttcatttccattatcttttgcttaccatattattttaaagcttgtcagtttatctgcagttaccaatgaagagataagagaactagcatgcttctagattaaattttcagggaccaaattattagttttaattttcataggtgaaagaaaataccagagactattttaagtgactataatggtatttccatgaatatgtactttaacggtatgatctgatgcaaagaaattttaaaccataataaaatatatgtatgcttaatatacagctcacatgcttaaatgtgtagaagggtcactttcaccaatgagataaaccaattgttcagggagtctgtttgaaaattatgttggaattttaaagtttcgttcatttgttcattaagcaaatatttattgaacgacataccaagtattgttctgtgcactaaggagtcaatggtaaacaagaagaataattatctgtctttttagggcttacagtgtagtggagaagatttaaacaagcaaatttaaacaagcaaataaacaacatagtttcagagtgaaaggtgctatgaagaaaataaaatattagtaggtgagggatagaaggtgatagtgggtgagtgtcatcttagatagatcaaggaagccctctctgatgaggtatcatctgagcagaaggagagggccacagcaaggtcgtctctagtgaagagcattcttgattgagggcacagccaacatagcttggcaatgagcttggcatgagtgaggagcagcaagaggctcctatgtgtctggagcctagtgagttggtggggaaggtagaaggatatatgtcctggcgggagatggagaccaggtgaggaagccttgcgggaggtggtaaattgattgggttttattctgaatgtagtgtgaagtcactgtaccattctaaacaggggaatgctgtgatctcattcaaatctgttaaaagggcattccacctgcctacaatctgaagaacagattgtaatggggcaagagtagaagcagggtgattggtcaggaagcgattgccaggagctgatgccaggatgatggggacttggactaaagtgggggaagtagaagtggggagaagcagtagattcgggatgagtcctggagatcatgctaaatggtttgccctggattgattgtgggagagggaacaatgagtcaagtcttgagccagagaaaccggagagatcgttataccatttcccgggatggagaagactgggaagagccctttattgtagaggaagggagtggtgaggataaagaatataatttttggcgtggttgctttgagacattgacatacacaggtagacagggaggtccagtaggcaaaggcacacagacatttggagaggagattgctttcagaggagaggtcaagactggggatttgccagtctagagatgatatttaaagacactggggctaggcacggtgactcatccctgtaatcccagcactttgggaggccaaggcagaggattgcttgaggccaggagttcaacaccagcctgggaaacatagtgagaccccatcacaacaaaagttaaaagaattagctgacatggtggcatgcacctgtaggcctagctacttgggaggctgaggcaggaggatcacttgaacataggaggtcaaggctgcagtgacctatgattaccccactgtactccagcctgggtggcagagggagacctcatctcaaaaaaataaaaataaagatgctgttctgagtgagctcatctgacaggagtatagatagataaagagagtaaagatagagaagaaaagggaagacttaacaaagaaagtgcctgttttcatttccggattcctttgtgcatgtacacttcagtctccctctatatgaataaaagaaataacaacaacaatgacaaaaataacaatgatgatagccaattcttttgtggtacttactatatgacaggcactctttgaagtactttacatattcatatattaatttcatgcaactatatgatgtagacactactattcccattttacagccaagaaaacaaaggtacagggagtttaaagtcatttgctcaaagttacacaacttgcatgtggtagagccagattcagcccaggttgtcttggcttcagaacccatgttctcattgatattctgtatttatatatacaaagcatagaaatcaccaagtatcatttatcaatataatttgcaattttgtgaataacagtaatttcaattttgaaatattagtaattttgaattgctaattgttcaagcaaatatttttgctagagtatatttatatttctacaagcctgtttaatacagtttgcactttacattaaaaagtaaattcagcaaacgctttaggatactacccttgactaatagtattgcacagtaaaagcacagactctgaagccagtttacctgggctcaaatcccagctctgtaattttccagctatgttgagaacatgactttaaccttttcctgcctcagcttcctcatctaaaatagtacctttcttatgggcttgctgtaaagattaaatgacttaatatttgtaaagtacttcgaacattattcagtacctaggtgctgtggtaggcctgttagttaggtctgttaaataactacatctaacgtgcataactctaggtacaggaagtgaggtttcagaaaaagcaaatactctactctgtgcaggttacttacttatattcaaaagtaattttttaaccccagttgctctgtgcaagttaattactcatattcaaaagtaatttttaaaccccagttgactaggttactctgtttcaggaaccaggagttgagaactgggaagtcagaagcagggtgtgagaggtagaattctagggacaacactacaaagtcataaaatggaaaagtcagcaattctaagttatgggatcaccaaatattcagacagataacccaataaaaagagaaatgcctcttagggtgcatattgtcttaggaattgaaatgaggctggagtggagtgggatcggggggagaagatatggaaatgtttccaggggaatttagggaaactagtagagtgcttgttactactcatctaagatgtttaacttggcactctattgcctttttgatgtgatatcttgattgttttattttagtgcagctgtatgattatttaatatctctatgggtcagttactttaatagtacctttatagaattgttgggagtatcaaatgagttaatatacgtaagtgcctagaacaatgcctggcacagaggaagaagaatgtctttgttcttatacatgtgttcataggttcaccacattccctggcccctgtgttatcctattgtttttctcactaagaaaaacattttaaaataattaaatgcactggatttttcatataacttttcacttaatgaagagtcaagtctttagctcatccaaagcaataaaaaatcaacataaaaacaatccaaatgatacaaaaatttgaatacatttatgttgacatttcagtgggtagacagtaaaatttctcagaggcctcacattttatttttgaaagtatttcatgtgctttataaaatgatattgatgagtacagtaaactgatgataagttaaattctctaggagagaaattaattgcattttagtaataatttaatggtctgaaattgcctcactttttgatgaagttgcagaatcatatttaattcatatagtagataaaataaagaatattaattgaagcatccttggagatcatattgtccaactctgtaatacaactagtgatgtaagtccaagttccagagaggttaagtggcttcttgtaggtgtcgtacctaaggtgaaatgagagctcctgattcttagtttgttcttcttttcactgagtaacagtgaattaaatgaactaacatttatatcatggtctacttactaattttttaaacataattgtaatcaacatttattaaaggcttgctatattccagggacagcattaactggttttattttattcttgtaataactctatgaaataggagctattttaatctgcattttaaatatgagaaaactgaaacttagggaagtcaaggaaccaacctatgatgccagtgaggggatgagctgggatttgaacacaaatcctctggctccagagttcacactgttaaacaccattctatacagtttcacagttaaatggggccaggcaaaaattgaagcctgggctgtatgcaggtctgcaaaatgggtatcataatagaaccatatttcctcactattaaaatgggaaaaatagcagcacctatctcatagggttgttgtgagaattaaatgagttaaaataggtaaagttcttagaagaatcttacacagtggacagtcaataaatgtaaactatcctgactgtatttctttgaaatctattaaaatctttcagggttcacttataaggagactggtccctctctgaaacagatcgtttgagaaagtcccacgtatatatggagatgtccaaggaatagattcatactaatgtatacttttggtgcttcagttaagtggaaagtgcttcagttgaatggaaactccagacatttttttctgaatgatgttctaacaatacaagaaggggaagctatgcagtgtgcttagaatgtgatgaattacactcccaccatcccccaagttgtgctgataaatgtgcaagggcaaagaaagttagaaagttggataagcagatcgattggtatttctttttgacagagttctgctgcaccttgaaatggggaatttatcaattcattcagcaaggaatgtgtgctttttcgtggacaattttctaggcactgaggatgaataaaacatagcccttctcattgagaatcacacagtttatatgatgtaggcaaatatatcagtgataaaattactgtagcacacaagaagtggtaagtgaacaaagagtaatgggaatcctgaccagccagggagtactgcctggagagcagggaagcttcatagaggagatctttgtgttggcttggaaggccacgtatgactttcttaggcaaggaagataggaaagtgttttcagacagagaaccacagtgtaaaggtaaagctcggttgggaaaacatagtgtttgggtaaaggccatgttgagaagggggtaaataacactggagaggctgtgcaagggtcagtttatgaggggcgatttcaaatgggggcatgagatgatcacttttgtgatttagtataagtctgtaggccatgtcagctagtaggaggggcaccagatcgataactgtcatgttatataagatgagggagtgagaggtgatgagggtctgacttcaagaccactggcaatgaggatggagaggctagaggtgagagatgcctgaagcagaactggtagggtttgatcaccagttgtctatggaattaattggtggaaagtgaaaaactgaaattgatcctactgttcctgttatttatgtaggtagtgaacaagggtaatggaacaggtgtttgcagggaagctgatgagtttaacatgtgcatgtggctttgcttctattggcacttaacaatttctttgccttttaattttagttttcaacatgtatatatcttgtctacccaatgagattataaatatttgttgaatgaatgaaggcatgtaggctagtgatggatagaagtatgtttgtgttaagagaaattccatgtagatctaccacgataaaaggtgtggaattgagaactctctccaagtggaatgtctgtggggactagtagtattgtttaaggtgataaggtaataaatgggaatgaagtgggctgttaggtgaagttgtagggcatggccaggacctgcaactgataggaaagtgtctggagaagatgcagtcgtcatggtcagtgctgtgatgattctcggggttacatagtaccatttataatctgaccttttcatttggtacttagcacaggtgactttgtatcactctgtgtgtgtgtttgcacttgtgtgtgtttgtgtgtgtgtggtggcaggagccatggtttggtccacgtcatctaggctgaatgaacatttactaagtttgtttatttgtacatagaaattctagactaacaataattatagtgaacaatctcgtgttaataaagtatgtataattcaggaaaacatttttacagttttattgagtcctttgggcttttgaaaaatgagattatctctaaaggaataataaagcatatgctaaaaaatgtgggcctgggagccagactgtccaggttcaaaatccagctttctatctgcgtgattctggcaggttacttgaattccatctgctttggtttccccaactgtatgaaggaggtagtagtatttctcttacagggttttgtgaggttcaaataagttgacatatgttgatcacttagcacagggcctggcacatggcaaatgctccctgagctgtaggtgttactagtgtactccactgacagtgccatggagaaaagtggcccaccatttaaacatgctttctggatattttaaagaagtggctatgcagaggcagctttctcctctgtcacactgtactttgtgtacagtgtgtggggccagaggcaaagtcacatgttgcacagccctgaggccacgttgtatctcagcctgcacccacacataggtgactgtcctgggtatgtttcacttgtgttcccattttgtccttacaccagcccctttaagatagagagagggaaattgaggcccaaaggcaataggtcacacatgccattagctatagagcttaggatagtattcattcattttattctaagcaatacttattgtgtgcctactgggtgccaggccctgggtctccagagatgaaagatgcaccacctttttctgtcaccagcatctcttctgtatggaatatttttgcctaatttgtgtctcacagggtgggttatgtaatgcagctgctccctcctgccccatgtgctcacttcctgagtgcttattgcatcagactgactttgattcccaggaggctccagctggggacctgaggtgctgctggtgccaccttctctgaggagatgctgtcctcaggagtctgaagacaaatgattgtgacaaactcagtgttagcagctatggtcaccttgaagctagctcactgtgacccatctccatccctgccctcccacccatcaccccatacctttgtcctgaggctcacactgcccctgttttttcttttttttcaaaatgctgttttaatctattccttgagccatagatgaaactaggtggcttggagcctgtggatctcagattgtttgtcgctgttcgctgttctagatgttctccaatttccctgcaagctgtaaaactcattaatcccataatgatgatttagggctgattaaaacataaacagtattactattaatgcttgctatgccatatttgtattctcagttttctatatacttttcattgagtagattttgttcttttaaagaagatatgtgtcttaagcttttaaagacacttttaagcttaatgtacaggaaaacatcatttggttccttgctctgattaatttctactctcttttccctctgacccacagtttggggatatggattcctgtcagtgacgattattaatctggcatctctcctcggattgattttgactccactgataaagaaatcttatttcccaaagattttgaccttttttgtggggctggctattgggactcttttttcaaatgcaattttccaacttattccagaggtaaggatgttggctatttgtttctgtgaataattgtttcttttgaacgttttagcactttgtatgtttttagcctccataattcttacagcgttttatggtctagtttatagtgtcttggataagagaaagctgaatcacagcaattgtaaaggcttgtcccaagctgcagtggatatcactatcagagacaaaattaatattctaggaggccagccactaggacgtgctcagacagctctgggacacctcagaaggccttaaaactttattctgccttgcacttggcaaatttaatttttccacacactgtttcattatttatttatttatttatttttctaaagagcatgcaatgtcaactgtactgcaaatgtcaaatgtaaatttataatgtatttaacatataccactaaattccctcatatatttactacagttataagtgactagagagtaaatgagagcatggttgacaaaccttttcattttttccaactgtggaaaaaatatcaattgaggactaataaataaatagcaacttattttttttctttgataaaatgtgttattgatctatcttgactatagtgcacactattcaatttatttcaaatctgtgttgtgcccatataaggaagagaaatggaggaagggaaataaatgaaaggaaaagagaggcaatgttgaagaggaaggaaaggagaaagagactttcatagaagggatccacaaaggggaactagagaaatatatgtatacatggactgtatctgccacccacaatgcacacacacagggagagacaaaccccatacagagagaaaatattaatagtatttcagggagtaccacccttatctcgtaatttttagaaaattataactaaagcttcctttaatttttcaagctatacattgaaagtgggtatataactttttagagttatagatttattatcattatttgatctaggacctaagataatatctatttcacagcctcaattgtagagataaaaaatattaaaatttagggtggttaaataatttgattatagccttacaatcagctagtaacaaagctaggatgacaatacagattttctgatttaaaagagtattatatacataatacatttaatatgatataatatatgtatttattatctcatctgctttatgggtcaaagtaaattaaacaaactaatactgtatgtggactaaagactctacattgatgatgttaaggttttctattttcttgaagtttaacaatataaagaatctgtctttgtaataatctctcaaattttcatagagttttttgtagcaaaatgattttccttttcttatttcactttattttcataacctcaatgttaggtaaatggaacatttatatttatatagccattttgcattgtataaacaggcacaaagaagttattcaaatgaggatgcggccatgatgtctccccagaggcaaacataggacaagaacccagacatcttctattctgcttcagaggggagatttacaatgtgtggaatggtgtaaagttgtggcttttcacccattagtctctcctctgattctatttatttgaagtttatgtgtcttgtctgttaggaacatcttgactctttataacttcaaactctaactccagttctttgtcctttaaagaaagaattattccattcttattgctgtgtgtgtgtgaaagagagagagagagtggtggcaattttaaatcttctttttgcttttattcttgggcctaggccttgatttatttacctttttaggatttatcacagttctgtaggtataagaggatttctcttgggaaaacagtaatccaagtggcctgccatatttgttttaaaagtttgattctggatatcatggactaatatattacttttagagacagtaggtaatcaatatctcatttatcttcattatctagacctaatatcgtattctaaagatgagaatcagagctgctgctttactgctaaaagtttactctttcaaggcaaatattgctgtaggtgttataggtgggaaactgtaagattctctggtggctttatttaatgagacttctagttgtaaggtttttgtgccatctcatacagttttgtcattcaaatttcaaagtttttgttttgtgatttttggcagctaagtttccaatattacttggatgtgaagagagacttagaacattggtgagaattgcatactggtattattttccagaaatcaagttaaatttcttggttttacttgaattgcccttttttctcccttaggcatttggatttgatcccaaagtcgacagttatgttgagaaggcagttgctgtgtttggtggattttacctacttttcttttttgaaagaatgctaaagatgttattaaagacatatggtcaggtaaatggactttatttaaaacatccaatattttaccccctaaagctactttatataggcaaataaagacagaaattttatttttagaattatgagaatggtccagttattaggcttgtgagtttaaggagaacaaagagtcaatatattgacaagtataagataaatacttgattcatgttgtaaaatttggaggttatttttgttttttttcaagtatcagcaatttaatattgaataacagatgtgcataattcatattctattcatattcatcaaaataagagtgtatacgtgttctaacacgaacaaacagtaacagcagaatctaataaatgaaaatacatgtaaaaaagagaaattttatatatctaaaaatacttctttacacatagaatagacatacaattttcctcttataaataaaaagcagtaaactctatttccttgtctgtatgaatcatcttttttcttcttataatctctttggtttttgttcccatatagaatggtcatacccactttggaaatgataactttggtcctcaagaaaaaactcatcaacctaaagcattacctgccatcaatggtgtgacatgctatgcaaatcctgctgtcacagaagctaatggacatatccattttgataatgtcagtgtggtatctctacaggtatatgttaattccatttttccttcattatactgcattctttatactgtgtaaacatgactgtttatgcagctaagtcagtttttgtacatttatgtatgtcagacttattcctatatatgtggggtaactggaatgtaagtctgcattgtttttccaccttccctgtatatgtttactctaaacaagtgagttaagaaagaaattgtggatcactgttctggacttcattattctctaagattatttactatatgagagtctctcaattgcatttatacaatattatatagcaaaatttattcagagcatttattttacaattctttgaagatccagaatcaaataatcctttgattgattttgaaattgcaagaagatttgcaaattattaaaattgtttttattaattgtctgacttataatttatatttatatccacatcttctaaataatattaataggcacaatttcttgagcacgtatcatataccaggtaatatgcttagcacttaattatttgatctcatttactttttataacaactactcagtgtagggattatttcttatgtattagaactatattggtttcaagtgatagaaatcaaacaaaattatatatgcacaaaggacaacttactggaaagatactagatgactaatagaacagccaagctacaggaaaaacaagaacctaggaaacattagaacccctaggactctccctccttctctttcctgtctcttagtatcattcttttctttcactgtaggctatcttttccataagtgggatacatagccactagcagttcctgaggtttgtcttataatttcagctactagaaggaaattgacctgactctttcagtcctaaatccaaaatctctggcaagtgtcttcctggttcagcttgaattagatgatcacttctagactaatctaagtgcttagagggctgggcccctttaatggtatcaagggaatgtggatggagtagaggagtggttatcaaaaagggatgctgaaaagatagtatcactggtgtctacaacaattctcatttgacagatgaagaaagtggaactttagatgttaaataacccctccaggtttactcagctagtgaatggcagatccacaagctatatagttaaacatgatataaaagtgaacagctaaaaacaaaataaaaaggaaagccagttaaggggaaaaaaagcaaaaaaaatagagcaatctggaagagattattatggcaaatacctgagtttccttctggaaagaaaacatgattggtcatatgcttctctccacctgattaaggaaaatctcaagtgtatttgaagagccagttctgtgttagcactcagctaagaggaaattattttttgcagtgtaatgaatgatgctttcagccaagagtttgcaaagaatctggaaatgttcaagtatataatttcttacaataataattacaattaacattcattaaatgctcaaggactatgcctagaacgttagatgaattacttcatttgatcttcctaataacctagggggcaagtgctgttgtaattaggagagtatgacttagagaggttaaatagcaaacccaaagatgctcagttcctaatggcaaagcttggattagtaccaaggctgccttataccgaagcctgtgttcttatatactttgctggactgccttccttatgttgctgctctactgtaagcaagatgacaacatcaactgttaaatatttattttttgtagtggggaaaaataatttgacccaaggatattgctttctgaggatatattatttaatgcgaggcacagcagagaaagcctaaagaatagtagttaaaacccttccttataccatgtgtctaaattctagttgccttacacaagcttttggcaaatactggattatagtgagattgtggttgaactctgacaagtcattcaagaggtgccagtcagctatattgctaatttaaacattgattaataattctttagataccagatggcagagggataatctgccatgaaatttggagcctaacttgaattcttgctctgatggaagattttcctgtatctttccagcgttaacaagataactttaggcagggctacacttctacagagaaggagctttgaacctggtccaaccttgaacaagttctcccctgggatcctcaagtcctgtaacacaaagcacggaagagatacagtttgagatttaaaatatttaaagggctgatcacctccttgaccatactagaaactcagtgtgacctctcctgatttcaggaaagttccttctgatgaacctactaggataaactagctgctaaatgtgccttgagtatcagaatgagctgataggcatatttatatttagaaaggaggatggctgtcaaagccttcagcttttgtgagaggctaaattatttttttaaatcataattaacaaataagtttaacttctccaaagttatattttagttaaagatttaaggctcctgatttaggattagctatgggcagaagacatgtttgcagtaaatctaagcaccatgacaaagatgaggccctcgacatgatcctgttttacataattttgaaataaaatcagaaggctgtttttattccacttatgacagtaatgctttcatttacttattcaataaacatttattgagttcctgttcattgtcctaggcactggaaattcagaagcaaattcttgaggagcttacagtttattcaatggaaacataaaatatagaaatgagcaaaacaagaaaatatcatatagtaataacctaccttgatgaaactaaagcatggtgatgtgagagtgatgtgtgggagcttcttttgattgactgttcagaaaaggtccctcaaggtgtcagtagggaattgtataatgagaaagaaccagtcatgcaaatatcggggaagaaaatatgctaaagactttgagaataatcaaacaggtcacacacaagggacctggaagctgaatggtagtggacttccccacatcaatgctggagagcagtggcacaattccttcaatattctgaatgaaaacaactgtggaattataaacctaggtaaactacctatctagtgagagggaataatggaactaagattctggaaatacacttccaggaataagaaggcagctgaagaaagaagagaaggtgcgtgccagggtgacagccctgcaccaggccttgagataatagttttgacgttaatttcttatggggactattttctcgctattttggttgaaggtatagtctcaaataaatagacatttaaacaaattgagcaacagactgcaattttcagttttgtttacattgcacaaaaaatcaaaagaaatgaaatttaagaaataagtaggtctggatattgctttaagagagtaagtattacaatataagtgatagtgattttaataataaaattaaaatactttctaatattttatattataaaaataatctaacctaggtgaccccattaaaaggattgaacatgataatataactcagggttcaatttgagttacaagtatggatttaagaattttgttgacaatcccggctgtcactgcttcaacaaagtttttccaaattgaaaataataaggaactctctaaaaattacagtgagttaagaaaggtggtctaattggcattactgtcaatagaatgtaaattatgtgaaaatctagattataaaagcataatttttgatcttgctgaaatgtagaaagaacaaagacatgttatagaatacttaaactgtatgacttaggaatgtctttattattcatccaagcaattctggctcattacagaatactcagctaagcaataatatttaaatttagaagtctctggtgttttatctgtgtttagtcatataaaaatcatagttttacacatatgtttttattttgttttcatggaagcatatttatcacagtgaaataatagaagatattaacatttaacagttagcttgattataacttttaaatatttagacgaaatgatttgagagttccttaatacctttgctccaggcctactaagtgtgaggcacaacagtctatgtggcatgcgtgtgggcacgtgcatgctttttggggaaaagtgggggtcacagaggggtaaaaaggaagatgtaggaaaaagaggggtgcacaagatgctatttccccagttattcagttattgttactaggtaatgtgtcacatgtcaccttgtgacatgctttgtgtttttctcttcgacgttcctgtgtagccaagtgtggagtcatttcactatctctgcagccgggtggggctccccagcccagacacagccttggtgtttgttggatgttgattgctgaggaatgtttggtactttggggagggtgtcagctcttcaaggccactagagggaccctggagctcgttcctccagcaatctgtcatcagtctctctttttatgaaatttcctgtgctttcatttaagaatagatactattaaatataaagtgatttttagaagttgattattgtgaattttatgtgtaaagttgaggtgcaataaaatagaatttagctgcaaagtgtggagatgttagggagattttctttgttgatgactgatatgaagtgacactctatgaatagaatgctaacatttttgaggtggttgggcctccatgagagtttaaatacacataattcattcaacaagtatttttccagtacttaacatatacttggcattattctaagtgctggcacatagggcacagtggagaggagatgaggacccagagcagttttcaagaagtaacagatgaggtgagacagcagagttcacagattccaaactttccacccttccataacataactgaaatattacacattttgcacagaaaaatggaaagcactctttttttttttttaagtatgaaatacaaaaaaaactgactggaagttctgtgtgtacatatatgcatggggcttgtctaccagtcttttgggtggtgtgtttttctccattcttgcctggcggtgggaagaagggtagaatattactggctatcacttgggaagtggagtgggaggagaaggggactggggcactaagaatatttgacataacacccctttctttagtactgtacttcccaactgtcttcagtttgctttgtgtctttgaattgagggtctctctagttcactttccccaggggtagatctccagtcatcatttggggtggctgccttgccacattggcttgggaggaaggacttgaggttctacttgttccctaaatagacttgcagccacttctcttatgtttagttccggtctttgccctctgccttcagaagtacttggtgcctctaatccctgaacttttttgaggttctgggtcctgcatcactttgcttcttgttgactttctttgtgaagtcagtcagaacttgccttcctctttccatcttccaaaatacaaatctcaatgctgtcatgttgtctctctttcctcctgtccttgcagttttatgtctttattcctttataaggacatagcttcaagagggcatttcaggatggactagagataaatatgtatatctggtctgcactatttcactaaaagaccatttactattttaaatcatatagttcttgaacatcacaagatttaaaaacagaaattagttaatttcccctataataacaattaattaaaatagaaaactatacaaataataaaatgacataagaaatgatttccactgatcttgattgactggtacttacataaaaacagtaactagaggcagatgatatagccaatcatgaggagaaattctgggttgtctttgctgttagtggaatttctctctcactgggtctatctcagagcatccctgccctggacaggtcattttatctggctttactctatgtgttgctaaggtcatgaaaattggtacctgaatccactgaatttagcctactttcactgatatgaagtatacttttattcatgaaaaactgttctaaagttttttttttattactccacaaaattcttatttcttattttcttactttaacaaggagactgagatgatgatttggaatgtgtgaactctgctgtctcacctcattacttctgttacttcttaaaaaaactactctgggtcctcatcttctctccactgtcccctttgtgccagaactggtgtcctttctcctttttaaggccagttcctctaaatattctcatctttcctgtggcctcttccagttttgttttgttttgttgttttaggacagggtctcactccataacccaggctggagtgcagggcttaatcagagctcactgaaatctcaaactccttagcctcaagggatcctcccacctcagcctcccaagtagctgagactgcaggcacatgccaccatgcctggctaactaaattttttttgtgtagaaatggggtcttgctatgttgcccaggctgatcttgaactccaggtctcaagtgatcttactgccttagcctcccaaagtattgggattacaggtgtgagccaccacatctggcctgttttcatttatctttcctgaatctctccttttcccgtgtctacaaacaagttccatcttttctacctcaaggtgttatttttttcctcaatctgctactcccaagttttctcaaaccttctttcccacaactgtccaacttttctaaagattggctaattctgaaataagactatatatgttagacatattcttaaatgctttacatatattaactcgtttaatcttcacagtaacaaccctgtgaggcaagtacgattattatttccatcttgcagatttggaaactgatgtacagagaaggtaaggaacttacccaaggtcacacaggtaccacattaggattgaagtgcaggaatcctgtttcctggtctgtttggttaacttaccttacactacgctgcctattgtttccatttgttaaccagccttcctcatcatctccgtacatgcttaatcatgtacagtttctaaactcactacctattctctgaacatttttagaataatgtaagtggttgttctaggcagcatgtgatattcctctttttaaaattaaattaaattattcattttttttgagacagggtcattgtaacctcagacacctgggctcaagcaatgctcccactccgccttcagagtaattaggactacaggcgtgggccacaagctatgttcctaatcctcattcactctttcttcctgagccattcctatagtttaacacgtaagtgagtacctattgtgggctaaatgctagaaatataaaggcaggtttttcgctggagcccctcccctccctgttgagttacttatgaggtggtcttggtaacatgataccatccttgctctgtcaccattttagctgctgtaatactttcctggtgcttcttctgagtctccttttcttgcaaggcagttggatgtggaagagaagcataggctttggaattacacaggccattgtttgcatcttaggattaaaatatgttgtttgatttgggaaaaaataattaacacctttgagcctttgctcatctgttaaatgaggagcaaagattcttaatttactgatttttgtgaaagtgaaataatttcttatgggtcaactatgcaacattgtgtctaatacattgtacacttgtgataaatatacatctccctccctcttccatttaccatttttgtcttttcttagtttttatcatagtcatcaagtcgcatcacttcatcttttgcacctttgggaatagcttctaaatccatatgcttaattatgtaaagatcatcacttaaaaagatgacttcttgtaataaaccacatagctgtttgaatctatttgtatatgttccttctaggttagggtaacaaaatgagaaggtaaaatatacagaattccattctttctcatttttcttatctaccttaaaatttgagtagattttctagaaagtaaagctggactttaaaagctcataggtaatttagtaataaagacaaccttctgaatataaatgcccacaagcctgcctttgacctgtcagataaattaagagaatttggaacatttactctctcttaatggaagagaatcttaaagtccaatataatttgctattcaaatgacgatttatcaggctttgcaccaccgattctctgttagagccttgaaataccagctagagccacttgccaaggaaggaaaacactacattaagaactacttgcttttccccagataaaagcttgtccaagttatgtaaatttgacaaaagcattttatttgatagctaatgtcaggagggatctagggttatctgttctggttccttatgttagctaatcatttggccagctagtatattccattcttgtggaggctggtggcatcaacatttacacagaaagttcattaaaaaataaaacaaacattgggccaggcactgttggctcatgcctgtaattccagcactttgagaggccaaggcaggtggatcacttgagtccaggagctgaagaccagagtccaggagttgaagaccagcctgggcaacagtgagaccctatcttaaacaaacaaacaaaatgttgatattgccaactcttaggtcagctagtataatcaaataagattaggtatgaatgtgcttttaaaggtacaaaaatctgtactatttactctgtttggagaacagtcagtttcttatgggtgtcagtcatggactactttgatatccatatgaaaagataacattctcattaattgtgtgataaacatttaaatagtcagcatttttgtggagtttataattttaatcctttggaatgtgctttcaggtccatgcaaacacaattccaatgttatgaagttttgagttctggagataatctgtagacttttaggtttttcttttccctctgtgaatagttttttatatacatatatataatatatatatttacatatatacacatataaacacatatataaagttttatattatatattaatatgtatcatatacatatatattattatctaataaatagatgtgtaaaaatgggtcatggagtatgcacacatttaattttgctgaataacaacaaaatgctttccagcctcttatgtttgtttaccttctcatgaacagcaaaaaataattcctgttttctctttgtctttagcaatacttggaaatttcagacttaaaaagattattgccaatttaataagtctgaagtggtatctttttctgatttgtctttctgattatagtgcagttgagcatcttttcatatgcgttttggtcataagtttacttttatgtttcctattcatctgttttgcacatttttagttgagtttttttttcttaatgatttgtgttaaagaaaaaactattctgacacttgttaaaacagtaaggaagagtgtattcaagactgttgcaataagggttgcttctatggcaacagcggagagagattgggttcaactctaaataaagtaaagacaggttggcatttatagccaattagcagagagaggggaagaatgcatggaatattcttaagagaaaacatcaagggtagggggattcctactaaaccaatttaatggaattcttgctgaaggcaggccagggtgattatatatcactttggggatggtggagaatgaagaattttttaaaaataattatttgatttttccctgagtcagagggaatgaggaatttgatcagatattaagagtgatcatatataaaggatgaggggattcttgctaaactgacttggcaggattcttgctatgactgaattctgcaaaaatggacacagaagtcgaaggtctggttgagaagagacctcagaggagcctaactgaaatttggtctaagaaagagtctgtcatttgtaggagttttacatatattctggatgttaattttccttgattaaatgatttataaatgtattctccaaatctgtggtttctcttttcactaagatttccttccatattttctttcaaaaattttaagtttaatttatttttgtatatgaggatccagttttttcctgtataaataagcagttatcctcgcttcttttgctgaacagatcattttattcctgccgtgtatcaagtttgtatgtattaatgtatctgtattttggctttctagtctctttcacttgtctatttggaaaaaaaaaacaaaactctgacctaccaccacactgccataattattatagtttttagtcagctataaagacaaggtctgctcctcaccttgttttttcactaaaagttgtctttgtttttccatatcaatatcattgtggagattttcattgacattgcattgaatttagagattaactaggctgcagcttacatttttatgatatttaagattttttggtttggtaatttactatattagaaatatttttaaaatattctgttagatttcttcctaattactttgtagctccacaggtatcacaaatgataacttttttcctactgttttctagttgattattactgctatgtaagagtacactgattttagtacactggttttgcgtcctgcagtagtgctgaattctcccagtattgttttgtttgtttattcttttggactttctgcatccatattgaagagcaaagaagccctttttaatttgttttctaattgttttaactcttatttctcttgttttattggcaagggctcgtaggacaatgttgagtagaagtggtgatagttggtaatttgtcttgtttccaactttaataggaatgcttctaagctcagtaggttgctttctttagttttctttttcttttaaatagccttaattagattaagaaacatttttctcagtgttgaatttcattgcaacttttttctttttctatattacagctaaatataggtaatctgtacttggctgatttttctacttttagaattagggaggcttaaagcagagtgaaaaattaaatgagtgaataattatattttctcacaaaatttgtgtcatttttgaattatacattgttcattaggtgttaattagtaacatgaacattagtgcaacttatctttgtcaaaagtacttgagtcaggtagatttgagtttaaatctgactctgataactaatcgggtttcttcaacttctaaaactcactttcttcatctgtaaactggcaataatatctacaaggcaggattattatgaggattaaatgaaatatttttaaagttatgactaagagtaggtatgcattaaatactaaatcttattatttctgtgtctaccatacaaccatacatcaccatcatgctcctgagaagtgagggtgatggggattaagtaagagaaacagcatctaacattatgtatagatgcaaagccacaaagtcctctatttcaatgacggaatattgagcaactgttgaaagagtaggagacttggttcaaagtcatcgaatcatatgccagatttataagcacttatcaactggaaggaggaaagcattttatgcagtggggtttcttgaagacataatggggatcattttgaagattcaaaagtagatggattagttcatgtaagagcaatttatagccaagagtgatatatatgagggcttccagaatagactaagagaacagggcctccatggcagtttgcagagaacaaaatcaaatagcaagtttgagcaaaggctataaaggcagttggattgaatttttagaagttaattaattaaattgacaaataataattgcatatatttatagggtataatgttatgttttaatatatgtacacattgtagaaagatgaaattaaacttattaacatattcatcacttcacctatttttcatttgttttgttgtgaaagcatgtaaagtctacttttttaaaagcagttttgaactatacattatgctatcattaactatggtcactatgctgtgtaatagagctctaaatcttatttttcctttctaagtataactctgtcccttttgaccaacatctctcctcctcccagtccccaggcctctggtatcaaacattctactttgtttttatgagctcaacttttttagattccatgtgaaaatgaaatcatgcagtatttatttctgtgcctggcttagtatcctcccaggttttaaaatatgcagcctttaaaaagaaggaaatgacaggatttccttctttttaaaggctgcatagtattctcttgtgtgttgataccacattttctttgtccatttgtctgttgatggattgaattttgatgctttgcttcttcctgagaacacatttcctggtgtcaggttcattagaagagagcttgatggacaaagtcccatgtgctaggccatcccatccttaggggcataacaaagaaaaaacagaagaaacagaagaaaatgaccaggggccagagtggaatggagtggtggtatatttttagctgtgaatacaggaacccctgtggaccctagtatattggaccttctttgagaaggtgtgtctttgtttgcattgccctggctcagacgaatgagaataatagatcatcttccatagtatgtttatctgaagatagagaactggtgtggggtagggagagaacattttggaataattttcaagaaagaggagattgggaagatctgccatggacagcagaaactctgtgggtaaggtgagaggtccaaagtgtatttaggacgtgttgctgtgtggtgtgtgtgtgtgtgctgaataactcattccttggtttagaaaaggctttggcaaagaatgcatacattttcaatgcttctaaagttacatgtagctactctggggaacattattttgctgcaagtagctgaaagaagaggaaaggctggatctggtaaagagatataggaaaagactagaaaagtaaactattttaaggagtttgtcattgaagtgaaaaaaaaatgagggagaagagcagttcagtggagtatcaggatttgggattgtgttagatttaagacagagaggaaaggccaggcagacagggagaggttgaacgttcaaaagagaatggaagtcatggtagggatatcttatggagcacatttctagagaaaaaatgaaaatagagtacaagtggagctgttcacaatgaaaaggaaaagggttcttattctaagatgggatggaaggtggagaaagtgtttgtgggtggattgtgagttagatgttctcaatttcaggcaggtgggaagtagtaatgaaggactgtggggttggggaaaagtgggaaaggcttttaataggctctctcttaatgtggttcacgttgactagcgatgataatacattgctgagtagaaagtcagaatcctcagccctgagccagtgtcctcattttcaggggccaaattgttgacgtttaccttcttcacacctacaaactcaaccatgtactacacagctgtgagatacagagtggtggcccatctagttagaatcacacactgttgtagacaaggagaacagtatgccttgaaactctggagtgcactgggagccaggtgatcacatgaaagtagtctgcttctttgtatgaagttccagaaacatcattatgttctttacctcctggaaggctgtccctgctcagatattctctgaaccatagtcggtgtcaaaatcagatgaatttggttccagaccactgcaataaagtaaatatcacaataaagcaggtcacatgatttctggtttcccagtgaatataaaagatatgttttcactacactatagtctattaagtgtgcactgtcattatgtctaaacaatgacattgatatcttaatttaaaaataccttattgctaaaaagtgctactgatcatccaagctttcagcaagttctaatgtttttgtaagtggagggccgtgcctctgatgttgacggctgctgaccagggtggtggttgctgaagtttggagtgactgtggaagtattttaaaacaatgaagtttgcaacatcgattgcttctttcatgaaagatttctctgtacatgcgagaacatgctgtttgacagcattttacccacagtagaacttctttccacattggatgccatcctctgaacctctaccactgctttgtcaactacatttatgaagtattctaaatcctttgttgtcatttcaacgttgttcacagcatctataccagcagtagattctgtttcaagaaaccactttgtttgctcattcatgagaagcaactgctcatttattcaagtttgatcatgagattgcagcaattcacttccatcttcaagcttaacttctcattgtaattctcttgctatttcccgtacacctaccgtgacttcctttactggattcttgaacacctcaaagttatccatgaaggttggaatcaacttcttcccaactcctgtaaatgtggatattttgacctcctcccatgaatcataaatgttcttaatggcatctagattgatgaatcctttctagaaggttttcaacttcctttgctgagattcattataggaatcactactatggcagctacagtcttacacaatgtatttcttaaataatatgacttgtaagtcaaaactactccttgacccatggacttcaggagggatgttatgttggcaggcatgaaaacgacattcatctccttgtacatccccgtaagagctcttaggtgactagatgcactgtcaataagcagtaatattttgaaaggaatttcttttatttttctgagctgtaggtcccaacagtggactgaaaatattcagtaaaccatgctgtaaacagatgtgttaccatccaggctgtgttgtttcatttctagagcacagacagagtaaatttagcacaattattaagggccctagaagttttggaatggtaaatgatcattggtctcaacttaaagttaccagctgcattaaccccaaacaagagagtcagcctgtcctttgaagctttgaaaccaggcactgacttcttctctttagctatgaaagccctggatggcatcttcttccaacagaaggctgttttaccaacattgaaaatttggtgtttagtgtgccaccttcatcaatgattttagttagatctcctggataacttctccatcagaacttgctacttcacttggcacttctatgtcatagagatggcttcttttcttaaacccaatgaaccaattctgctaccttccaacctttcttcttcagctttgtcacctctctcagccttcatagaattgaaaagaggggcttgctcctactttagggtatgttgtgggtggtttgatcttctatccaaaccactcaaattttactcatgtcagcaataatgctgctttgctttcctatcatttgtgtgttcattggagtagcacttttaatttccttcaagaagttctcctttgcattcacagcttggctgtttggcacacaaaacctagatttggtctatcttggcttttgacatgttttcctcactaagtttaatcatttctatcttttgattttaagtgagagacatgcaattctccttttacctgatcacatagaggccattttaggattattagttagcataatttcaattctcttgtgtctcagggaatagagaggccctacagaagggaggaaattgggggaatggctggtcaccggagcagtcagaacacatacaacattaattggttaagtctgccatcttatgggggcacagtcatggtgtcccaaaacaatgacaatagtaacatcaaaatcactgattacagatcaccataatagatataataataatgaaaaagtttgaaatattgtgagaattgccaaaatgtggcacagaggcatgaaatgagcacatgctgatagaaaaatggtgctgatagacttgctcaatgcagggttgcaacaaaccttcaatttgtaaaaatcacaatatctgagaagcacaataaagtgaagtgcaggaaaaagaggtatgcctgtacctgtcactcctgaataactaatagaaataataatggtggtagttggtggtgtgatgctggtggtacctgtcacgtgcaagaaatatacccatactttgtaaatattattcatatgcaacattcatttaggtgtaattatcttgattgtacagataggaaagctgaatttcagggaggtttaacatcagagtaacgatttgaacttagatttgttacactcagagttcttttaaaaaagcaaaattacttcctgatttgtatgcttctcatcgattaaaatggctactttaaataaaatctaagtatacatttatttttgtgaaaaaattcatatttatttgactagaaatttttgagcatataaaactagaacttactgacataaaaaatagttattgtgtagtgtgatgagtactagagtagaggcatatgcaagttactatgttgagagagacgtggtgtgttttggggtgggacgtgatgcaaatggagtggcgcatattgggatggaacatgatgaaagcgaaatggtcaaggatgctcttctgagaaaatcatgcttgtatccatcttgacagatatgtaagactttactgggataatacagttgggcagaacagcaacttaagtgcagagagtgcttccagtcattgtttttaaacatttgtcattttctaattttgaaacattcaagaaagtggctatagaacaatggtttttaatcattcccttagacagccgcttgatgaagcccattacctgttgcaacagacctaccaaattttgcatacaatttaaaggggttcatgaactcactgatgctcctctatgacctgccagccaatactctctgatatagagaaatacttgaaaaaggaacataaatggctatgggtaagagtagagggcactggggtagctttttagctattattatattaaattcctacaatagcactatgaacttggtattaagtcaacttacagctgcataaattaagatccagttaagtacagtgactccctcaagttcacacagataataaacagcaaaactatgctgaggtccccttctggggtcttgcatcccaagctcatgtttgctccatatacatgatactaatttcctaatgagaatattgctgtaataagttatgatttctaacaattagcttacaaatgaacttttgtaaaacaacttgtagtgagttgaggattgcccgcatagtgaaaccttgttagttttgattaccagtctgtcatagctgataatttatgatttgttttattttgctatgggcttggctatagagtattttggcagcatctgtaaaaatttcttttgaaacaatttttttggcaagattgcacctaaagcttctcaattatctagagaaattccaagttgttattatgtgtttgatatgttgtgttagtcttatccatacactgtggcaggttttgtgaagaacctctaccgttatctcgcctttgatgctggagagcccagtttgttagtgttaagttctggaaagcaataaaagtgcatctatctaaacatgttctatactaaattgctttcactaatcaagcaggacttatccctatttagaagaattagtgaggttttagtcaattaggcttgatgtcaagttaatttttcctccattagtgtaatgaagaattgctgtgttgttctgtcatgcatgctgattgataaaaaaagttaataatgaatgccaatacatttttctcttgaaaaatgaaccaataatatatgaggttcaagtaaattattctgctcatcagaaagaattgcttattctactgtgtggaaagcccagtggcaaaccaggggaagcaatggaatatttaaatacttattctattgctggtcagtctttaacatcagctttttaaaagattgccttataaaggatgtccatttcataattgttggatgactaaaatagaccactttgttttctttggcttctgctatttgcttatttaaaaatatttatattgtgctctattctttgcatgctgcattctgcagtttgggaatactgaatcaagacctggtgagtaacttttactcagtggattgcatgatgaaagatttgccaaaccataaggtgttttattgtaataaatgaaatccatctcccttgaagaagcacttgcagaggcagaatttactctacattttattattccattttatttattctatatattcaaagtaaggattctaaatcaaaaagataccaaagctaatgcatcctgtaaatgaagtgtggtcttgccaaactgctttttgaggttgacattactatattatatagtaattagcagactggctcatgcacacatacacacatgcacacacacacacacacaccctcatctataatatttatttgtctctacaatcatatctattcagttttgtgtctgaggtaaatttccagataacaaatttcacttttataactattaatacttcactaataatcttagtgaataaaaaaagaattgaagatatttgaagaacaatttaagtgctgactcttaataaaagtattaagggttagagttagggcattgattaggtagtgaaatttgattctactatatgtctgcttcttagatagagaatttcagtcccattctaaggctctcaattcaattaataactcttcatttatttaaattaagtggtgacattctcctgcctttaactttgctctccatgctaattattggctcaatttatttagaagtattattatagaagttttgaatcctaataagtagaaagagagaccaatgtgtgagcctaattctttttcgaagtgattaaggtattattactttttatttgttatcaggtatcagaacattaaaagtaaaataaaagaacagactttattttactgaatctctttctacttaggaatatcaaagtgcttaatgaacatgactttatcgaacctttataccaacttagtgaaagtggataaaagtcagaaacgtttagcagcagaggaaacaccaatagagattacattggagggttccataagacattccggcctctggtcttatgctttctagtgtatcctcctctattaccaggttacaaaatatatattggaaaaaataagtgagggatcagccatcattatagtttcctgggttgcaaacaaacacccaaatctagagattatttccatttagaaagtagaatctcaaacattcttttctggacaaacatcacttttgcaaaaatagtctgtattttttttgtaatttttatagtgtttgtgactttgatcaaaatcccagaatcatgtaacttttatattaaaacaataatggcaatcttaaactgggcctctgtgatatatcaggctacttttgtgacaacattttatattctgaatgatatcctggtccatacattaaatcagtgatgctatattaaagcgtaggaagatggtattcagtcattcatttcatcatttattttcttctcatctattcagtgatcacctgccaagtgccaagctctgctctacaccttagaaattccatgacaaactagacagaaaatgttcatgcgctctgccattctggttcattctagtgggacacacagcccaacatcatagagttacaaatgccatgcaggcacttataagtaggagctaactaatgtgtacatgtggacatagaatatggaatgatagacaatggagattcagaagggtgagcaggagggaagagggtgcatgataagatattacttaatgggtacaatatactttatttgggtgatggataccctgacatcaccactactcaatctatacatgtaacaaaattatagttgtaccccatacatttatacacataaaatacaaaaataaattttaaaatgtcctgcagggaattaaaatgtgatatgatgatgtctgggtcactatgttagtgtgggtggtcagggatgacttcctcaaggagaacacatttaagttaaaatcagaattgtaagaaggaaccatccatgtgaatatccgagagaataatattatggctgaggaaacagccagtgagaaatctctatggtaggaaacagttcagtgggttttaggaacagaaagatgaacagagtaggtaggcacagtggatgcttgtataaaatgacattggaaaacattctagatagaaattcttcttcaaagtaagcattcctgtgttctaacacttaaacagtgttaataatacaagacattggctccaaaattacattttattaaatgttataaactaagaacgggtcagtcaggaaaacaactgtcttttgcaatcagtttttgcaatctgtaaacagtagattatatgtagtggatttgaaagctctaggatggtgttttttttctcctcaacaattggaagtattattttaattgtgtgtgaagtgttagcaatcctcagaacacctcagcacattagttcagtgtcttctactcaaaaccagaggtacttgaatcctggaggtactccaccttccaggatggagactggcaaacagcaataaaataataatttcttaccttatagcaacaagctacttaattcagaaattcctcatctgaaaaactcaattctcttgagcagtatcttgacctcttattgcataggcttaggagtcaaatagtctgggcacaaatcctgactttcccattttctagctgtgtcgttttgggcaagtcccttcttccagtgtcctcatttatttcctctgtaatcaggatgatgtacttatcacaggcatttagaaaagcatcttgcaaacaataaatctttaacaggttatctgctttcattgctaatattcttacttttatgccctccctttccaaaccatcttctgaaaaaatatgtaagtccacaaagttagatgcaagatggttgccaataaaagtcttctgccttgagggctgggtgtggtggctcacgcctgtaatcccagcactttgggaggctgaggcaggtggatcatgaggtcaagagatcgagaccatcccggctaacacggtgaaaccctgtctctactaaaaatacaaaaaattagccaggcatggtggcacgcacctgtagtcccagctacttgggaggctgaggcaagagaatcgcttgaaccggggaggcagaaattgcagtgagccaagattgcgtcactgccttccagcctggacgacagagtgggactccgtctcaaaacaaacaaacaaacaaacaaaaaactgccttgatcactagaatagaggaggaagcctctgagatccattgactgaaatgtattttgatatttcatttctctacttaattcagcacccccccccaccatttaattaaaaataatatttattgaacacccattaaacgctaaattctcggccaaaaaggaaaaaaacatcttgtcctgccaggagattttaatccagttcttcaactctcagtagctaagaattggcaaacaaacaacaaaagcatctctgcactgaattttatgttatattggtgaaccaatttggaattgattaatgaactttttttatgcacatcctttccatgttgtgcataaatgtccatgtgtttgctctttggaaagactggaatacatgcttcatgggacaatgatttgtgaacatgtcatgagagaagatgtacttttaatattactacacatttatttagtcaacaaacactcactgagtgcctacagtgctactacattctgggtgaacaggaaccaacaacacagaaaataaaatcctgtatctcctggggatcacaggcttagcttctttggcatggaggctcaaatcctgtttctgcacatttctagaggtatgactttggttaatttacctaacctttctatacctcagttccctcatttgtaaaatggggataatatctatatagggcagttgtgaagattaaacgatggtatatgtaaaatgcgtaggacagtaccaggagcatagtgagaatgcggcaggaggctctgttattactataaatattattatcactactgctctgtgctccagtggtgtattctgtatatttcatgcccgattcttcttttcttaaacgggtcagcacatctttagagtggcacagtgacagctttcagagggaatgtggtcctggtacccttatcttgtgtggctcctacttctcacgctccatgtacagagtagagacagcctctgtttttctgaactattgaaatataaaccagggtgccagttgccccttgcagagaatagctttatatttgtctctctgttggcaccttgcctattccttatcacccccacttggtcctaagtgcctgttctgtcatggtggttgcagttaccactggctctaatctctcttctcatctatttctttgcctcttaccactttccctaagctccttgaccgtgtgtttctagatcttctctgccacagaaagcagtctctctttttttgcaggtgagtcacatggagtatattgagtgggatcttgaatatttcagttcttgatgtaattcatgtcaaatgttaagacatgacaggcagctgctgcacggggttggtttctccacggcatcccatcctacccctgttttctcatatgaattattctgaaagccttgaggctgatcagtgtagatattcctatattttggaaacactacttttaaggatcctagcaactgatttctccaacttacattgaaatttaaacaatttcctggtgcctcctgaatccctttaagatgttgcagtaagaatgagagttgtgtaggcggggaggtacattttatgggctttttataagaaatgatatcctgtgtcctgaatgtaccagtgcattaatgccatcctcatctgtagcaacagtaagcagccttttagagtggtataaatagtccattaggataaccataaatatttaactattatttactttagattccattggcaaagtagcagatttcttgaaaacctctcaggtttctcctaaattgttcttttcaaggcagtaaaaatgctatggtcccaaactgaaaataactgattattaattaaactactaaagaccaaaacaactttactcacattccacaggattggagagacaggaaacaacttgcgaggtttctagaaattgttattttcttgttaatggttattttaattagcaaagagagttttggaaatagttttgagctttacctgaaactgaatgactggaaggtaagtgcatttgaattatatttggttacatgcattaaaggataaataatttctcttttctcatgtgaagcttcattttggtagttagctgacttttcaggtaaggagaaggaccaagtaatcaccagctataaaatacaaacatttatcactggaaaacctagtaatgaaagcaaagcctatcaaaactttatgtttacagaatgcgtttaactctttttaatatattcatgtctatgtaatccttttgttacttttttcatgaaaacttatttaacagtatatatagttcatagtattgtgttgtggaatgagcattagactttggatatgtcaaatcctttccagagagagatggcctactcaaataaggataaataataaataggggagagacactttgtaaaactctgagcacagtgtaggtgaaccacagggcagtaacctgaggctagtaacagtggagctgtcaacaacctatgaccaaagggaaaagggaagaaaaaaggttctctagaacttgaaaggagctagttttgtgtagaaagctactgtacgtggaacagtgatctttagttgtggacatagccagcctaagttaaccttcaaggagggagccaagggaataaatatcccgatccccactcctccttccctccaattttgttagagctcactgtctggaacctgctgagcacctggacatgagggcctttgatagagtgcctgcaggtcttatggggaaagaagagcggaaagcggatctggagggagaaatgaaagataccttgaatactctaccacttttctctctatcaacctccaatcttgtcctccatgtggttgacaaatgcatgttcctaacacagggtatgcacaaaatcccatcaactaccatatcattcccatgatgtcttttactaatactgcaacctgactaaaatattggtccccagcaacactcttcatataaaatattgggagaagaggatgcaattaaggaacattaattatagctgcagctcacttctggagctggtcatgaggcctaaactgctcattatagggcccccccatcgacaataccttctgtatttaccttactgtctgacatcaccttgactggatgagtcattttccagttagggcaattgaaatcttcatttctttaagatctgagtgcttggtagtcttgtttttattgggggatcgttgctattttcccttgaccaggactatcgggaagggagtactaagaggcatcccactgaattccctgagttttaagcactgtccttgtcttcattctgtagcagaaaatcaattccccctgatcattaggtgtgattaccctagctagttatagtgactttctcatctctgttggttcagggccataaataaatttaaattgccaggagttagtctctacttccagtgaatcagaaaatgaccatgtttcctggtataagaattactgccttggacagtagggccatcaaactcatcaagtccaaggtttcggggacaggaggcaagaattctttttttttttattattatacttaaagttttgggatacatgtgcagaacgtgtaggtttgttatataggtatacatgtgccatggtgatttgctgcatccatcaacccgtcatctacattagttatttctcctaatgctatccctccccttgccccccaccccactaacaggccccagtgtgtgatgtttccctccctgtgcccgtaagttctcattgttcaactctcacttatgagtgagaacatgcggtgtttggttttctgttcctgtgttaatttgctgagaatgagaatgatggtttccagcttgatccatgtccctgcaaaggacatgaactcatccttttttatgtctgcatagtattccgtggtgtatacatgccacattttctttatccattctatcattgatgggcatttgggttggttccaagtctttgctattgtaaatagtgcagcagtaaacatacatgtgcatgtgtctttatagtagaatgatttataatcctttgggtatatacccagtaataggattgctgggtcaaatggcatttctggttctagatccttgaggaattgctacactgtcttccacaatggttgaactaatttatactcccaccaacagtgtaaaagtgttcctatttctccacagccttgccagcatctgttgtttcctgacattttagtgatcgacattctaactggcatgagatggtatcttattgtggttttgatttgcatttcgctaatgatcagtggatgatgagccttttttcatatgtttgttggccacataaatgtcttcttttgaaaagtgtctgttcatattcttcacccactttttgatggggctgtttgtttttttcttctaaatttgtttaagttccttgtagattctggatattagccctttgtcagatggataagattgcaaaaattttctcccattctgtaggttgcctgttcactctgatgatagtttcttttgctgtgcagaagctctttagtttaattagatcccatttgtcaattttggcttttgttgccattgctttttgtgttttagtcatgaagtctttgcccatacctatgtcttgaatggtattgcctaggtttccttctagggtttctagggttttaggtcttacatttaaatcttcaatccatcttgagttaatttttgtataaagtgtaaggaaggggtccagtttcagttttctgcatatggctagccagttttcccaaaaccatttattaaatagggaattctttccccattgcttgtttttgtcaggtttgttgaagatcagatggctgtagatgtgtggtgttatttctgaggcctctgttctattctattggtctatatatctgttttggtaccagtactatgctgtcttggttactgtagccttgtaggatagtttgaagtcaggtagcgtgatgcctccaactttgttctttttgcttaggcttgtcttggctatacaggctcttttttggttctataagaaatttaaagtagtttttttctaattctttgaagaaagtcaatggtagcttgttggaaatagcattgaatctataaatttggactgtatggccattttcatgatattgattctttttatccatgagcatggaatgtttttcatttgtttgcgtcctctcttattttgttgagcagtggtttgtagttctccttgaagaggtccttcacatcccttgtaagttgtattcctaggtattttattctcttggtagcaattgtgaatgaaagtttgctcatgatttggctttctgtttgtctgttattggtgtataggaatgcttgtgattttagcacattgattttatatcttgagactttgctgaagttgcttagcagcttaaggagttttggggctgagatgatggggttttctaaatatataatcatgtcatctgcaaacagagataatttgactacctcttttcctatttgaataccccttatttctttctcttgcctgattgccctggccagaacttccaatactatgttgaataggagtggtgagagagggcatccttgtcttgtgctggttttcaaagggactgcttccagcttttgcccattgactatgaagtgggctgtgggtttgtcataaatagttcttattattgtgagatatgttccatcaatacctagtttattgagtgtttttagcttgaaagggtgttgaattttattgaaggccttttctgcatctatcgagataatcatgtgttttttgtcattggttctgtttatgtgacggattgtgtttattggtttgcatatgttgaaccatcctcgcatcccagggatgaagcctacttgatcatattggataagctttttaatgtgctactggatttggtataccagtattttattgaggatttttgcgtcgatgttcatcagggatattaggctgaaattttctttttttgttttgtctctacctggttttggtatcaggatgatgctggcctcataaaatgagctagggaagagtccctctttttctattgtttggaatagtttcagaaggaatggtaccagcttctctttgtacatctggtagaattcgactgtgaatctctctagtcctgggctttttttggttgttaagactattaattactgcttcaatttcaggacttgttattggccttttcagggtttcgacttcttcctggtttagtcttgggatgctgtatgtgtccaggaatttatccatttcttgtagattttctagtttatttgcgtagaagtgtttacagtattctctgatggtagtttgtattcctgtggatcagtggtgatctcccctttaccattttttttattgtgtctatttgattcttctctcttttcttctttattagtctggctagcagtctacctattttgctaatcttttcaaaaaaccagctcctggattcattgattttttgaagggtttttcatgtctcaatctccttcagttctgctctgatcttagttatttcttgccttcagctggcttttgaatttgtttgctcttgcttctctagttcttttaattgtgatattagggtgtcaattttagatcttttccactttctcctgtggatatttaatgctataagtttccctctaaacactgctttagctgtgtcctggagattctggtacgttgtgtctttgttctcattggtttcaaagaacttatttctttctgccttaatttcgttatttacccagtagtcattcaggagcagtttgttccgtttccatgtagttgtgtggttttgagtgagtttcttaatcctgagttctaatttgattgcactatggtctgagagactgtttgttatgatttccgttcttctgcatttgctgaggagtgttttacttccaattatgtggtctcttttagaataagtgctatgtggtgctgagaagaatgtatattctgttgatttgggggtggagagttctgtagatatctattaggtcagcttggtccagagctgagttcaagtcctgaatatccttgttaattttctgtctcattgatttctctaatattgaaagtggggtggtaaattctcccactattattgtgtgggagtctaagtctctttataggtctctaagaacttgctttatgaatctgggtgctcctgtattgggtgcatatatatatttagtatagttagctcttcttgctgcattgatccctttaccattatgtaatgcccttttttgtcttttttgatctttgttggtttaaagtctgttttatcagagactaggattgcaacccctgcttttttgttttgtttttgtttttgtttttgttttttttgctttccatttgcttggtaaatattcctccatccctttattttgagcctatgtgtgtcttcttacatgagatgggtctcctgaatacagcacactgatcggtcttgactctttatccaatttgccagtctgtgccttttaattgggccatttaacccatttacatataagcttaatattgttatgtgtgaatttgatcctgtcattatgatgctagctgtttattttgcccattagttgatgcagtttcttcatagtgtcaatggtctttacattttgctttgtttttgccatggctggtactggttgttcctttccatatttactgcttccttcagagctcttgtaaggcaggcctggtggtgacaaaatccctcagcatttgattgtctgtaaaggattttgtttctccttcatttatcaagcttagtttggctgaatatgaaattctgggttgaaaattcttttatttaagaatgttgaatattggcccatactctcttctggcttgtagagtttctgtagagagagccgctgttagtctgatgggcttccctttttaggtaacatgacctttccctctggctgcacttaacattttttcctgcattccaaccttggtgaatctgatgattatgtgtcttggagttgctcttctcaaggagtatcttagtggtgttctctgtatttcctgaatttgaattttggcctatcttgctaggttgaggaagttctcctggataatatcctgaagtgtgttttccaacttggttccattctccccatcactttcaggtacaccaatcaaacgtaggtttggtcttttcacatagtcccatatttcttggattctttgcttgttcctcttcattgttttttctctaatcttgtcttcatgctttattttattaagttgatcttcaatttctgatatactttcttctgcttcatagatttggctactgatacttgtgtatgcttcacgaagttcttgtgctgtgtttttcgactttatcagatcatttatgttcttctctaaactgactattctagttagcaattcctctaacttttttttcaaggttcttaggttccttacattgagttagaacatgctcttttagctcagaggagtttgtttttacccaccttctgaagcctacttctgtcaatttgtcaaacttattctccgtctgattttgttcccttgctggtgaggagttgtgatcctttggaggagaagaagcattctggtttttggaatttttagcctttttgtgctggttttccctcatcttggtgactttatctacctttggtctttgctgttggtgaccttcagatggagtttttgagtggccgttctttttgttgatgttgatgctattgctttctgtttgttggttttccttctaacagtcagacccctcttctgcaggtcttctggagtttgctgggggtccactccatcccctgtttgcctgggtatcaccagcattggctgtagaacagcaaagattgctgtctgctccttcctctggaagcttcgtcccagatgggcacccatcagatgccagttggagcccttctgtatgaagtgtctgttgagccctgctgggaggtgtctcccagtcaggaggcacaggggtcagggacccacttgaggaggcagtctgtcccttagcagagctcgagcactatgctgggagatctgctgctcttttcagagctggcaggcagtaacgtttaagtcggcggaagctgcgcccacagctaccccttcccgtgggtgcactgacccagggagatgggagttttatctataagcttctcactggggcggctgcctttctgccagagatgccttgcccagagaggaggaatctagagaggcagtctggctacagtggctttgccgagctgtggtgggctccgctcagtttgaacttcctggaggctttgtttacattatgaagggaaaactgcctactcaagcctcagtaatggcagatgcccctccccacaccaagctcgagtgccccaggttgacttcagactgctgtgctggcagcgagaatttcaagccagtgggtcttagctttccaggctccatggaggtgggacccgctgagcaagaccacttggctccctggcttcagccccctttccaggggagtgaatgattctgtcttgctggtgttccaggcaccactggggtatggaaaaaaactcctgtagctcgcttggtgtctgcccaaacaaccacccagttttgtggttgaaacccagggcccttgaggtgtaggcaccctagggaatctcctggtctgtaggttgcaaagaccttgggaaaagcatagtatctgggctggagagcactgtccctcatggcatggctcctcatggcctcctttggctccaggagggaggtccccggctccttgcacttcctgggtcctcaccctgcttctgcttgccctcagagggctgcacccactgtctaaccatcctgaatagatgaactgggtacctcagttggaaatacagaaatcacctaccttctgcgttggtctggctaggagctacagaccagagctgttcctacttggccatctggcctgtcagtaagaattctttaagtggtgtattaggcataaaaataagatagattactttatttatctgtttatttatttagagacaaggtctaactctgtcgcccagctggagtgcagtggcgcaatcatagctcactgtaactctccttcagcctttcgagtagctgggaacataagctcatgacaccatacctgggtaattttttctttctttcttttttttttctgagatggagtctcactctgtcacccaggctcggctcactgcgatctcggctcactgcaagctctgtctcccgggttcacaccatcctcctgcctcagcctcctgagtagctgggactacaggcgcccaccaccactcccagctaattttttttattagtatttttagtagagacggggtttcaccatgttagccaggatggtctcgatctcctgacctcgtgatctgcttgtgtcggcctcccaaagtaatatattttttgtatagacgaggtctagttatgttgttcaggttggtcttgaacacctggcctcaagcagtcctcccccttggcatcccatagtgctgggattactggcaggagcccctgagcctgacttataccccttttactctcacctcttggttcctggatttgtgcattctctacagcagagatgacaccatatacttggctgcccaacctatgaacagaactccaacctctcagggtgttatctcttggcttgcaccctggctgaggcttcatcaggacatttcatcattctgtcaaactggttgctactagagggtgcaggtgatgtgatccatgaattatatgtattgagcccactgtctcacttcctttgctaaaaaatggttaggagatagttttcacaggaaaccttggctatatatcagttgcactataagtccatgaatgatggtgcttgcagaggcactgaaggcagggaagacatatattgtatatgtctatctttgtgagtccaagagcatccccttataatgggaggaatccagtggaatcattctgctaccacatacagccacctggtcctcttgccctgttggacagtgatagctttttgggggctcagcatcagccttggcttttgaagtttgggacttctttagtgctggaaagccagattccccctggtaggagaagagaatgctgaacctatatatatcctccctctgcaccactctgtgctttatatgtgggtccattaagcaaacatttggatggttgatgaaggatactgagtgacaatcagattttcttgttcactttattactgaagctatcctctgtgatggccttttatgagatttagtggaatagaattagattcacattctgtacttattaaaagagactcttccatatattcttcacctcctcctttgtgtccttcttgtctgtccttatctttctcctccttttagtcctcttcctgctcctcttactcatgcttgctcgtttccttctccttgttctccctgttttccttttcctccttctccacatgctccaccttgtcctcctcctaatcatccttctcttcatcctcttcctcatcctccttctcatcctccttatacttgtcttcctcctcctcctcctcatgctacttctccctttccttgtgctccctattcccccaggcctcctcatcctctacaactttctcctccttccttaaactgttctgcaataagcccatttgttttctccattttaatttctaagtactttttttgaaaaaaattttgttttttgccctccaatttatgttgggattcaacatagtctccctctatttttttaactttggtgcatgatattctttctcccccattctgataacactacacattgctttgacttccatccccattaataactaagtgaaaggtgttacaagtcttgctgaagattacacggtaattcttctcacagccaagcttgaactcagttttagattccagacttagtgtcttttcactaggctgaattgcctcatcatggctgaggatagaaatagcctcatatttagagtaaaactcagacaagaaagcaagcaagtgaacaacaataacaatagaaaacaaaaatttaaaaaggaaagagagagataggcatattcactaatttaactacaggaacttgaatttagtgttctctctgctcagtgatttaattctaggtgaattaaaaaagaagtttctgtgaaggtttgctgactttggtttgttccaaaactattaaaaatgtataactcttacctgctcaacagtatcatttgggaccaaagcatgaggcataataaatagagtcaataatatctgtacttagaggtatgagaatcattcctgatatattaatttaatttcttctgtaaaattaagggtgtttgtatacagactctgtagtgatatcaggtagtcaagacttggttttgtagtcttcttctgaagtcatcacaataaggaaattttaaacatgtaattagacaaattagattggaagatgaaaacaactgctttaattcaaaataatctcattaagtatatcacggcattaagttttacaaagcccaggtcacttcctctgtggctttccctatgaccacctttgtttctccttcagctgtaattgcttcccgctctggggcattttttatgcaaactacccgatccacctgtgctaaattatgattgtttattgtgttgtgcgtttaagatacagctataaaataaaaagcccacattttaagaaaagatagaattttttatgcggataagctttgtttcttaaaataaaaaagatttgatacttactcaatgttgcatcaagcgttcagaagagttttctgagaggtggggaagtctccttgcgaattaccttcagatcctattacagagaagaattcccatccccgatatgtgtgtagtagtaaagcactgttgccaaaaatgcccattcactctttttttgtatctctgggtaagtttaccaacctttttgtgctttaatttcctcaactataaaatgatggtaacagttgtactttcctcatagaattgttccaaatgaattcggtatttgaagtgcttagaacagtgcctagcacattataaatgctatgtgcctttgctgttactatttctactacgaccacattggtgatgacaatgatgatgaatcctattactaacagtttcccattcatttcatattaattaaaaaaatatttgctccaaatgcttttatctgtgcctacaaacaaacaaaaatccaaaggtgcagatttgccactaacgaaatagtaaagagatgtattgcaggatctaaggctgattctgaaagtgttggtccccaaagtgtttggagtggtgaagtgatattggagtaactgtaaaacctcttagatggttgctctgaagtaagcccctctctgttggatatatattgcatgttttttttttaatgtatccatatatattatgacttgtttctccaatgtaaatacacttcttgaagacagaagctgtgttttccatttctgtgtatttcctatagcattcaacagagtgttttacaaatttcagaagttcaataaatgtaatgattagctgcttaggtagaggtgagaggaggagaattaggaataaaatgttctccagttaattgcaaagtgcttttgtacttaaaaatgaatttgcattttatctttttctacaacttctggaaagtgttttagttggcatttgtcatttgattttgtacaattttgtaaattttctggaaatctaaattcctacaaagagtccatcacaggattttctattttttaattgtttctacatgaaaggaagtgttagtgtaaaggctagcctgttccatttacacttcatgcaatttgttaagaaaataattaagctttggagctggtagagaccatattgttacagcctaaaccctccacagggtacctggaacagaatggaaactcaataagttgttgataaataaatgaatcatttagtacaatgtcttcatttcacagttgaaggaactctgtgataacttgctccctgtcacatggtggcataggaggggttagaacaaatgttgctgatgtcattcatcatgctctagttgtggatttcacatttaaattgtaacataaaaaagactttaagtttagtctttgaataacttccttcattttaaatcttgtgtataaataaatttcttaggttaatatctgctacattttagaaaggcagtaggaagaagtttatacaagtcaaaagaattgttttaaagggaaagtaaaggaaaatatctgttagtggcttattcgaggtgtgtcagttgatgaatttcctttctctcaaccataagttttctttgctctgttatatattattagggtttcctagttactctaaaagactttctgttggaacaatttgtttttctcaagcacaacccatctccaacttgtctgtatttctgagactttcaagaaatgttggttatcattttaattgattttctgctaggatggaaaaaaagagccaagttcatgtacctgtttgaaggggcccaaactgtcagaaatagggacgattgcctggatgataacgctctgcgatgccctccacaatttcatcgatggcctggcgattggggcttcctgcaccttgtctctccttcagggactcagtacttccatagcaatcctatgtgaggagtttccccacgagttaggtaaggagctctgttcatattgtaaaagtctgcttacttcttgatttcagtggaatgagacttttcaggtgacatgctcttaaaatccttctgatgcactaaaatgaagaccttgttggacattgatgattatctttgatatcatccagaaataaaaaaaaaactattcacttgatattttcttcttcttcttctaggagactttgtgatcctactcaatgcagggatgagcactcgacaagccttgctattcaacttcctttctgcatgttcctgctatgttgggctagcttttggcattttggtgggcaacaatttcgctccaaatattatatttgcacttgctggaggcatgttcctctatatttctctggcagatatggtaagaagcttaaaatttgtattttcttttaatttaaaatttggaaatgagtatctggattataagttaactaagggtggccttctgctttccgcagtgtggaaggcctttctgttgtaattcagaacaatcccatttcaacagatcattctacttgagtagtttacactaatagtaatttgaaactgatcctcactggttctttaaaacataatcgtattgtttgaaggtgaaatgatttgtttttgctgaaatagagatattttcctctatctctattccccttgtggttggtacatcttgtcttatgttatagtatgtccctataggactttttctcctttttctccctcttttgtgtctatgccacatttggaagaggaataacttattagagtaaatagcattttgttatttcaaagttctaaacagtgacagctttttgggttaaactaaaactggtacactaaaattggtaaaattttgacaatagttatttgacatagtatatatttatatctgttcaatgtctgtgtctttgtatctgtgtgtatgtgtgtgtttgtgctcaaaagagcgtgcatggccgggtgcggtggctcatgcctgtaatcccagcactttgggaggccgaggcgggcggatcacaaggtcaagagatctagaccatcctggccaacatggtgaaaccctgtctctactgaaactacaaaaattagccgggcgtggtggcgggcgcctgtaatcccagctactcgggagtctgaggcaggagaattgcttgaacccgggaggcagaggttgctgtgagccgagattgtgccactgtactccagcctgacgacagaacgagactccatctaaaaaaaaaagagtgtgcatgtgtgtgtgtaagagagagaatatcctgtgcattttaaaataaatcatggaaatctttctataaaatgataatatggtagtgtatgaaaatcaaggactatttcttttgcatttggaactggatgtattacatacataatttaataatttgagttttttatttgcattcttacctccaaattatatttgtctagctctgttcgttgttctctgcagaccctcagaagagcaaggatttcatctcttagaaccaatgctacatttataacttttgtcacaaaattaatgtctcatgctatcttatagtcattttactttctgatataagaatggaatcttactagagttgttcagtttaaagaaataatactaagaaataatactcatcctggagtgagcaaaataggcacagttcaaggggcttttccattcatggggcttttcctctagaaagaggggatccttaaattaaacaacaaaaaatcacacagatgactaaataattacaaataataaaaaatgctatgaaataagagagaaagtagaatatatgatgagagatgataataaaggaatctagaataaactaggattagctagcaaaagtgttttagcaagatataaggtaaaacgtgaaggatttagtccactgaaaaattagagaaatacaagttctggtacaggtgatggtagatgtgaagattttgctgggtaaacttgaggtcatgaaagaatgggttgggtgaagcatagagagcaggtaatggaaaaggagaaagagaacataaaatgaggtaaattccatcccactgattgattcagttggagaaaaatactacttcagtacttttactcttgttgatgcctgaaagaactagatattcctattaagctatcagtactaaaacctttaaacatccaaagtaaatgatcataccacccctcccagcattctattacaggagcaccttgttttattgcacattgctttgatgcactttgtaaatgctaggttttttgcacattgaaagtttttggcaaccctgcctcaagcaaatctgtcagtgccattttttgaatagcatgggcttatttcctgtctctgtcacattttgttaatttttaaacgatttcaaaccttttcattattattataatatctgttatagtgatttgtgatcagtgatctatgatgttactattatgttttgggacgccatgaaccacattcgtataaaatggtgaacttaattgacaaatgttgtgtgtgttttctccctgcacccctgatcagccatccttccatctccctctccttgggcctccctattccttgacacccaacaatgttgaaattacaccaattaataatcctacagtggcctctaagtgttcaagtgaaaggaagagctgcacatctatcatattaaatcaaaggcctgaaatgattaggcttagtgaggagggcatgttgaaacccaaggcaggccaaaagctagactttgtttgccagatagcccagttgtgactgcaaagaaaggattgatgaaggaaattaaaagggctactccaatgaacacacaaataataagaaagcaaaacagccttattgctgacatgaataaaatttacgtggtatggatagaaagatcaaaccagctacaacattccgttaagcaacagcctatttcagagcaaggaataactctcttcaattctatgatggcttacagaagtaaagaagctgcagaagaaaaactggacattagcagaggtgtattcattaggtttaaggaaagaagccatctgtatgacataaaagtgtcaggtgaagcagcaagtgctgatgggaagctgcagaaagttatccagaagatctaactaagatcactgatgaaggtgactacactaaactaatagattttaagtgtagctgaaacagccttctgttagaagaacatgccatccaggactttccatactagagagaagtcaatgcctggtttcaaatcttcaaaggataggctgactgtcttactagggactaatgcagctggtaactttaagttgaggtcagtgatcatttaccattccccaaatcctagggcccttaggaattatgttgaatccactctgtgctctagaaatagaacaacacagcctggatgataacacatctgtttacagcatggtttagtgagtattttaaacccactgttaggacccactgctcagaaaaataaaagaaattcctttcaaacattactgctcattgacagtgcatcaaatcacctaagagctcttatggagatgtacaaggagatgaaagtttttgtgcttgctaacacaacatacattccgcagtccatggatcagtccatggagtagttttgacttacaaatcatatcatttaagaataatttgtaagtctctagttgctgtagatagtgattcctctgatgcatctgggcaaagtaagttgaaaactttctagaaaggacttatccttctagatgatatgaagaacatttgtgatttatggaaggagtcaaaatatccacattaattgaaattggaaagaagctgatttcaaccctcatggatgactttgaggtgttcaagacttcagggaaggaagtaactgcagaggtagtggaaatggcaagataactagaatgagaagtggagactgaagatgggactgaattgctgcaatctcgtgattaaactagaatgaatgaggggttgcttcttacggaggaacaaacagtgatttcttgagacagaatctattcctggtgaacattgctgaaatgacaacaaaggatttagaatattctataaacatagttcataaagcagggacagagtttgagaggattgcctccactttggaaataatttctactgtgggtaaaatgctgtcaaacagcattgcacactacagagaaatctttcatgaaagaaataaattgatgttgcaaatgtcattgttgtcttattttaagaaatttccacagccactcccatctttagcaaccactactctaatcagtcagcagccatcaagatggaatcaagactccaccagcaaaaagattacaactcacccaaagctcgaatgattggtagcattttttagcaataaagtatttttttaaattatggtatatacattgcctttttagatattatgctattgcacacttaatagtctacagtataatgcaaatatatctattatatgcactgggaaacctgggaattcatgtaacttgctttattgagatgtttgctttatcacactggtctggaaccaaacccacactgtctccaaggtatgcctctaagtgactgttttgtggtttgccacaagatggcaacagttatctaacaatatatctgtcttctagtttccagagatgaatgatatgctgagagaaaaggtaactggaagaaaaaccgatttcaccttcttcatgattcagaatgctggaatgttaactggattcacagccattctactcattaccttgtatgcaggagaaatcgaattggagtaatagaaaatggaagatggtgttgttaataaaggcatttaatagataaaaacatctccaaaaaggattttgaagctgatcctatttagttaaaaagataattttgctttcaactgtaggtccagaaaactaattattggcatcagtctgtgaaatagtccattatttgttgttaaaaatgcttcaaaaggttttcagtgtcagtctgagatgcctggtatataggagcctttgggaaatacctatttttcagtattccatgcatattagatatcaccatgaagcaagagacatgcattctataatcatgtagacactcagactcaggggaaaatacaagttatatcctgaaagcctttaaaactctatggtaggatcaaagattcaaatggtttcagagaggttttatttcaattaatttgttctagtgctttcaagagcaagtacatcaaaatgtagaaggtaaaatgtatgcaacactaatataaattattccaagtctttaaggagccaaagaaaaaaaagatttctcacagctttttgttctgttttgtatttcaattaggaacttgcagtattattttgaaaaccattctaaaataataggagttaggaaataaataaagttttgctagccctgctaagttcaggcttagaggcttatcgctaagtataaacttcaccagattccacgaaaagctggatagctttttttctgacttatgttgtggttgcacccctcacaaatggcagaacagtatgtaaagctggtaacacctcggtttcagtgcaccatgtgtttgctttgtgaaggtgaagaatatgttggtttagagaaagaaattggatgtaattttatgcaatttacttttaaagacaaacataactatttagcagagaatattttaataaatgcaaaacaacagctggactgctgtacatcaaggacagattaactggaaaacatatgttccttatgtgtgatcgagagccattcagaaaagacttcctttgtgttcagcctatacttttccatatggtataccttgaaaaaaattagcacaccatggttatttttctaccttttataaaagacagagcctgtttactcatttagaagatagagaaaattggtctaaaattgaacatcctagattcacactcccaagtcacttaaggtgatttgatggtgaggaaaatgattgacaaagcccaacaatgatctcaggaattacattttccaacagaccaaaaaatgttttcatgtagcagcaatgcagatttggtgaatatttaatatatattttagtatgtatttcactttatgactgacaattaaaaaatattgtttggccaaatagtaaacacccttttgaaaccatgtattgtgtcatttgttatttaatatttgtcctgttgagtgactaccatgtatctggtattatgggggagagatataaataggaaatcagtgatgtgctcaaactgtaaatctaaccccgccatggcttatttctataccagttgcttagcatggccaacccaagagtcgacgattttaatagtctctgaatagtattatgatgatctctcgttacttagtagggccctacctagtagactgtttcgctttaccacatctaaaagggtttctttaatgaggtgcttaaatttttaaaaagtgaactagttgagaagagccaaaacagcaccacgagtttaccagacaattaacataggcatatcaacagctgattactgatggcctgtgccaggggaaaacttccagtctgtcctccatgctctggttggcatcatcttcctttaggtctcactttggagaccagacttctgtgctcatttaaggtccattacggtacaagaggttaaccctataataaataaagattctccaacactgatgttactacagcttctttctcactgatactttgccttccatacaactgtgggtggcaatgtctgtgttggattgcttttccttagcttcctttctgtgccaggtatgcacaaggcattctctcatggccatttctcttccacattgggaatttccagcttctggatggtcccagaatcagtgagtttactagtaagatttcaggcaagctaaggcagctggataaactgaagactctaaatacctgtttcattaattctaagacatgcatttccccaaatggtatgctgtaatcactgacagctgggtagcattgtggaggtagttatacttgcctgaaaatgaaaatcatctgttgcaatctggtaaggctaagaaaatgccagtagcactgtgtttaggatttgatggtgtatagtaacaggattatctatgttaggtttactttccttcttataaaacaagtgtggaaggagcagtgcagggttggcatggcagtcccatggtggctgggaacccagactcctttaatccattagctctgccatctttaacttgtgactcccaccttcaagattgcttcatgctctaagatggttgctacagattcagccttaaggtctaaattctacatagaaggaggaatgggtagaaaggcaaaaagttcaaactcagctcttcctccctctttaaagagccttttcagaagtaatagccaataatctccacttgtattcaatgaccagaattagtcacatggccataccaatcttcaggagaagctgagaaacattgcttttagctggatacattaccagcaataaaatcagaattctcttactgaaaagaagcccagactggatatcggctgtctcaggtacagacaggcttgtatcagtttaattcgtaagcttattactccagatggttcttatgcagccagtttagggaactgctttttgtagggattctcatgacttgtttcagatcaatcccttgtcactttaactattttaattatactggcccatctgagcagtctttcctaataaccagtatttttctttacacacttgaactacttgtcattatagtttctctgccttagcctcctgtgagtactatttatttaccttgaagaaatcctatgtttttcacaggatgatctatattctaaggaaacggaaacaaaactcttttctatggactttgatctttctgtttaaagctcttctgattactggagccacatccagaattatgaaactaagtactattaacacatactggcaaaagtaaatttaaaaaaccacttatttctccccctgccccatatgggttattacagccagtcagtgcaagaaaagttggatctgacatccaaatgtggtaaagcagaaacagtctgctaggtagggccctactaagtaaccagagatcatcataatactattcagggactattaaaatcgttgactttcgggttggccatgctaagcaactggtatagaaataagccatggcggggctagatttacagtttgagcacatcactgatttcctatttatatctctcccccataataccagtttgttatctgattcttgtagataatcaaatgggctactgatgacatcaaatctcaacttcatttactttggatatatacggtaagaataacaaggaacaattttaatgggtgggcttgcatgttttaaagtttatacaatggcttaattccttctgcagtgactgtgcatgttattcccacaacagtatagaccaactggtagtaaaaccccagtgaggcaacacgtggataatttattgccaagcttatggtcaccaacaggatgtttgcttaggggtcataggaaagaaaaataaagatgaaaagttatgagtacagggggaaatctccttggaagaattcaaatgggaaattcttccctctctcaaaaagctgaggaagtttataaaacttgtttcagtctgtattttgtggcaagctccattagcagacctcacagacactgcgggtggtgtctgtagagaggctcagaggaggtctggcaagtgcttttgcaggtgaagtgaggagagttgttgctaccccagcttgaccttcagtcgtagagtttgttgggataaaaggtagacgaatattcccatggtctagtgtgagccgagtggtgtgtaagttctggtttggaacaatttaaaatcttgtgtaagaggggtactatcttgaaaatagaagaaggtcagtactgagtgaacttctggaaaaccaaggactaagtcatgtggggcaattggagaactagaatacatcacttggcaggaacccctctgaagaatcccaaaagtgtctataaaagaaaggttagtcttaagcatctgtcagacagacagcattaagcaacattttgacagtatctgtcaagtatgaacttttttatccccttttctttccttcatctgagcacttaaccctggaagggccaaaagccaattagtgaacagtggggagtaaggaaataaaagagaaggattccttcccagaagtcttacctttgaatacaaattgaattactgattgatgcattggattggacattttcaataactgacttgagactatgtttgtgtcttgaagtaattgtaggattttatattccctccaaagtcctgtgtgagaacagccattgtgccaccccaagtttcatccaggggtaggagaagggctagccagtccttcactcccaagcagacagtgaggaataaaattaaaagttgtttttagttacccctgtgagaactgcatgttaatatactgattatatctgccctttaaaaattagtacttacacacacctgtagtcccagctactcgggaggctgaggcaggagaatggtgttaatcagggaggcggagcttgcagtgagccgagatcgcgccactgcactccagcctgggtgacaaagcaagactccgtctcaaaaaaaaaaacaaaaaacaaaaaacacttacttacaacaaacctgtgtaatgggttctatttttaatgctaggccaggctgcagctgagaagttgcaaaggaaccccatgctcagggatgcagccagggaagagcatgacaaaagccctcccacccacactgctgacctcttgcagcagctgcaaacagcaggagagccctttcctgttgcagtatccctccagcgccctctactgagacagctcaatatcatgctcactgtaaaggatgggtgctaaaggaattctgttcattatgacagagcatgtatttagagtgaatttggagttcagtgttagtaagttggtaagtggcacagggagacattactccgtgactaaatgacatcactctgtggtgatgggacttcgtgcatttgcaatgttggggacatagacttttcaactgtacaggatggggatccactctccacccttctgtatcctgctttttgcctccagagactgacccacatggacctcagtgggtatagccaaatggagaacttcgacaagagactggaggaagtgaagagaggaaggatagagtatcaatttccttgactatcctcctactgggtatccttgggctgcctgttttgcccaagaaggccttctctacagaaaagcttcttacaatatctgtggctaaggcccagcttgttttccttatttccaatttatcaatagctggcacttctgtaaatagatagaattcaaagaaattactagaaaaatgaaatacaattaaaaataaataaataaattagctgggggtggtggcggacacctgtaatcccagttattcaggaggctgaggcaggagaattgaacccgggaggcagaggttgcagtgagccgagataatgccactgcactctagcatgggtaacagagcaagactccatcttggaaaaaaaaaaaaagacatagaaaatccaaccccatttttattattagataaacctcattttttattagacacaattattctttgggattactgttgaagtttataaatgcttattctcaatttccgtacctagttcatctaaaaaactgttgctgggccagcacctgcctgtagattcccctcctttggttttggtgcccactatctctctgtccctttggcctaggggtagtaacagctctactgtcttcagccctgcgttcatgtagcatcacctgtggtttccctgcaccccacttgcatgtttgtaatcagtccctttgtaaattaatggacctgcctcaccttaccctcatttgagcatggcagttctttgtttcccctgtggctgtgattatcagcagtaaacgtcttatcctggaagaggaggtgactgtgtgaatttggcaggagaaggaatacacaacaagtgcgtatatgggagtgaagttgctgctcactgaaagcaaggagaaaatttatggggatgaaagatgataagccattatcattaaacattttagggtaacaagatggcattaggttagattaatttgtatgattaactatgcatacagagaaaaatatctaggatgttttgagagactagttataagtggacttatcacatttctggcagataagaatcttttgactagataaaagactgtaaccaactgtccaacaacacgtccttaagcatgaatcatcacgtatttttaaataaagacatagatttctagatagggaagaatgaatatatttttatgattgtttattgaacagtttatgccttatgggaatccttctcgtgtagatgtatctataggtcacattccctcacttaaagcatactatgaagtgctacgtggaatatctgagtgagaacaccgggactgctgcttgtgactgtattgctgagacgttccacccattcacagcaatgcttataaatagacaatgttttttctttgggagtcattgtatgtgctaaccttaatggtgttactctaataattatgtacgagcttgttaatgaactgggaaacattgattttagaagcttagaaactgtggaggaaggtgcttcatatggatctttctactttttgtatcttttgtgtttccatgaaaaaatcttttaatttgtgaaaagtaagcctcagaattcatgtctaagcatttcgtagaaggatgcacgtgagaaaaagcacctgcgctgtcatagcgatcctttggtgttttaagatgaaaaagttcaaagcattttagaatagtcataaagatgacattgtataagttaggagctgggttgtcctgtcactttgtggtgacaaaactggtgaaagtggtattaaaatcattgctggatatgtttggagtaatgcacttctgttgattgtttctgcataccttgacttctgcccttgtccatgtaaaagcttcactcttccttttagaaactggtttctcccaacccctactggagattgtcaaccaatgcacttaacctcacccatttgccacaagctgggcaagtcacccagtctgggtcaattgtaatctttacacagaaacttctaaggatgtggagagccaaaactcttgcctcttgtatttgaccccagagcttctggtggtcatgttcctggcacaaggagaaacccgggaaaatgagatggatgctgagaaaacagtagaagctatggggactgattggagagagttgtgttgtctttggttctagttcctgacatccttagtacttttcagttatttttctttagttccttcaattttgtaagttacccaagttattctagtatctcagtatgtcctttttggctttaactaatttgatttgggtttctgtttcttgcaatacaatttttctaattaatacagcagttaaatattgagatatttatttcaaacaaaattcccagctcttgaatttagcaaagttcctcagcactttctggaacttcactatcaatgtcaggagtcaacttcctaggcagagtatagtaaaatctctattatgttccagtagtggtgagcaaaaatctttcaaaactcatggataatttctatttatttttatttcactttggaatacatagaaacattgtacatattttactttttttcacttagcacaattaatacatcaaaagtgaaggttgttcctcagtgacaactatgagagggtaactaacatttgatgccactgaaaagttttggagccaaaaggggcctcaatctataacctaaacaaccttgagttcagaacaaataatggtgttgaaataatattctatgtatagaaccatatgatttttaagagcaggagcaggataactgagggaataacttatataccttgacaagccatgcaaaatcagacttcatagataactccaaggaagatgtttaatgtaggatatgaatctaggctacacttcatacatcatgttttcacagaaaaatgcagtttcctagcaaccatcacctggttgtcaagttattatttgatttttacagacatctggctttttaaggcacatgcctcactgatatgtaagcataatatctaggttagtgttgaaataattatatttcactttcttccaaataatacttaaaaattaattgttcaaactttgcctctttttgaaattatgataaaccattgtagggaactatggtagagaataaggaaaaaaattctgagcttgttcttctgtgaatgaatgaatgaattcatttgttcaataaaacacatattcaatgtctactgatgctaggcctggagatataaagatagatcagagctcatctctgctctcaagggtatcatggcatgtggaaaaccaatgatatcacaaatcagagtgttatgttagagaacatggacagtcagctcaatagtaattgtgcacaaatgggagaattctccttaggttggaggaggagtcagtgaaaaatacttcacaaaggaggaaacatttgactgtttgacttgggtttaatgaataacgtcgaattcatttctgatcagacctcttctctcctcccatgactggaaccaagagccttttcctgtggtttaacttgagctggaactcttttgcaattaatgataccaaaagagaactgtagagtgtaaatatgtgttgggggtaaggtgttccagatagttgtgattaataacattaccacaagcagaaaggaaatgcaaacaatcaaattaatactaactgaagaaaggcaggctactcagcggtacgcacactatagccacactttttgttatatatgtatgtatgtatatataacatatacatatgggaaaatattttctagtacattagtaggggatatctcgatgggattatgaatcattttaaattggttctttgtaaaatgttaatattgtctcaatttttttcaataaacacgtacttaccggtaaattagaagggaaattagaagaagtcttggtgggatttttgaattattcaaaatatattatttttaatgctttccaattttcttcaatgaacatgtattctaaaaaagctaatagatgtgattaggaaaaaggagaaaagctaacaacttagaggactgaaagattacggaaacatggtaactcacatgcttaaaactttactatgttccttctctttgtctgtcaggcaaggtagtaatttcattatctggagtatttcacctccacatctctgcaataccagcaccttcaacagtgattggttagaggttggcatatgacatagttatgaccattgagacgtgatgctgtgtgtgctgtgaagtttctcaaaaggagtaaggaagatacagcctcttctttctagggactttgtttgtaggtgtgacacctggagcagccattttgctactgttttgtttctaattgtgttccccgccgccctccccgctcgccccgaaaaacgacatgtttgagttctaatccccagtatttcagaatgtgaccttatttggaaatagagtcattgcaaatgtaatttgttaagatgagctcatactggagtagagtgggttcctgatctagtatgactggtattcttattaaaaagagaaatttgaatactagctacaccatgtaaagatgaaggcagagatcgtggtgatgcatctacaatgtcaacaattgccagcaaatcatcagaatctgggagagaggtatggaatgaattctctctcgcagccctaagaaggaaccaatcctgtgcacacctgaatcttggacttccagcctccacaactgtgagacaatacatttttgttatttaagctacccagttgtggcactttattactgcagttctagccgactaatacagctaccttgagaggaaatagcatggggatgaaggtgatgtgctgaagaagcacagcagaaagtggaaagatggtccatgaggacatccttagccactgaattgacaagcctcttccctggagtccctcttccttgggattttttttggtgtgtgtaataatcacttttcctaatggtgcaaaccattgtgagttgctctttgactgctagtaattaaagcaaactaaccaagtcagccctccccagtgttcctttttgcaatctaaattctgatgtccaactcctccctgggccactccctgtccccagatgtctctttgtatatctaaagaagaaaaagaaggataaatcctttttctcccaagagatctccctgcttttgtgaaaagcacaaagaagggcattatctaacttttctcatcattagaagtcaagcctggccgtgactcccgttatgacattttgatggccacattttatgagaaaagcccaaacagacagacctgtctgtaaattctttcatcctttgcattctttctttgactgtaccttagagagtgtttgattattgcaggggagatggaaaagaagcaggttctggcctatgctctagttcctcactttctggagttatcttttgggcctggagtctcttggagtgaggaaaggaagccatttttatactttacttatggtagagttaaacttcgtactcttaggaggctacatgcaatctccaagaggaagagagtgaagaggttaagaattatgccatcaaaatgtgctgctctggcatattgactatttgaattacagatattttaaaaacatcagatatgaagaggtcactctgatcttaattctgtgtcttaacagcaggagatgaaattcccacatgggagatggcctccctgtcacagaaggaataccattctccctatcaatgatgagaaattggaactgagagaattctgtatagaccttgttcaagtaattcttctattttaaacctccccacataatttagctgccttttcaaaactactgtcctttgtgcaaccagtatagaagcgattgactctcactgcatccttgggtcttcttttccctatatgggctcttttcccatatgggctcttatgtcctgtaaaacatgtattaaataaatttgtatgcttttctcccgttaacctgtcttacatcaatttaattcttgggcccaggtaggaccctaagaggacagaggtcgagttttgccacctctgcaagagaaaagagagatgcccagaccaccaggcctgggaaatctttgatttcccaggctttgaagtgggcactgtgtctgaacctggccctctgaaacttcctgttcctggacatcccagctgctaatgtgagttgcccttgcactggctcagggctgggacattaaaggaatttcccttttgttgacataacagtaggatggctatagctaacaataatatattatttagtttcaagtagctagaaggaacatatgaatgttcccaacacaaagaaatgacaactatttgagatgatggatatgctaataaccttaatctgattcctatacattatatgcatcacatatacatacattatatgtataacatcactatgtaccccataaatatgtgcaattattgtcaattaaacaaataaatttaaacaaacatt

SEQ ID NO: 771 - DNA, 4385 bp, Homo sapiens
ggcattcattctttcctttctgtgggtgtggggaggggaccacagggcacataccccaccctgggatccagctgagcaggggggtcagagatgacagctcttccggctcacaggccaccggcccacatacagggcaatcagaagaaagaaacagcacaaggaaggcacagagggagtcgttgtccctgccagaggtgcagcactccgggaatgtccctcactctccccgtccctctgtcttgcccaatcctgaccaggtgcagaaatcttgccaagtgtttccgcaggagttgctggcaattgcctcacattcctggccttggcaaagaatgaatcaacccaccctagatcccataaatagggccacccaggtgagcctctcactcgccacctcctcttccacccctgccaggcccagcagccaccacagcgcctgcttcctcggccctgaaatcatgcccctaggtctcctgtggctgggcctagccctgttgggggctctgcatgcccaggcccaggactccacctcagacctgatcccagccccacctctgagcaaggtccctctgcagcagaacttccaggacaaccaagtaaggggccaagaggggcacctgcaggcagggcctggggaagagtgggagcagaggggaggagaggtgaagagactcaggaagagcgttgggcaggactctaggagtccagggtccaggtttcagctcactctgtgccaccagggtcccctggtggaaaccatgccccttccccccatccccaccccctctcagcctgaacagactcccccaggtccacatcccctctcccataacccccattgtccaaagaaggtgggagcacttttagtccccctgcacagatgaggaaactgaggctcaggaaggcccaccagccacatgcctcctccagtgaggaggtcaccctcctccctgccagactcagaaccgcctcttcccccaggactcccttctggactgatggcctcctgctcctgccccttcaccagtgcaggcccagcctgggccctgctgcccagctagaggggctcatggttccaagctgggcggcccagaggtgccacagggacagagctggaggggtggctcctagggccattcctgggttgtgcctcttatcagtcccttgcagttccaggggaagtggtatgtggtaggcctggcagggaatgcaattctcagagaagacaaagacccgcaaaagatgtatgccaccatctatgagctgaaagaagacaagagctacaatgtcacctccgtcctgtttaggtgagggccgacatctcctgggggtgtgagagtcagactgacgtcacaggcaagggatggccaaagctgagggatcctgtcgttcacctcgctgttctgcccggaattcatctgtgttcatccttcctctgttccttagagcaacgtttatagcacatttccatgcagacacacagacagtggtggggatggacatgcacagtcgttagaaaacaagacggagagaggaggggtgcctgggagcgggaggaggggacactggatccagcctggaaccccacccagtgccttcatggaaggcttccagggaggtggccttaaaagagccaacctgcttcaaaaggaaatgtggggtgttcccggcaggggctggagtcagagagagcccccccttcaggaaggagcaagccatcgcagggtcaccctgagcagagctgctgagcagcctggaggggcaggtggccacgctagcacctagcacggtcctcaggccccgccccagcggatctgctgcggagtggcttagagcagggctcttgggccgcagggtggggagacttggtggggtgcagcctagggggtcgggagaccagcgaaagtgaagcggggccgtcacaggtgtgagagaacaggcgcagggtgaagaggcagggagccagggatcagccgcccccagtgggtttctgactctggcagctgagtggattgggattggggcatttgtggagcaaggagcagaatacagacaggttggggagctcagccctggggtgccaggggatgggaagtgggaggactcaaggatggggtcaggtttgacccgagagctaggggaacggctggcatggagcagactggaagtaccgaggtggatccccgggagagggtataggaagggaagcagcaagctgagtgcaggggagaaatgcagggtttctgtgtgttgggtggcggggggggtgaaagccacccagggaggcagccaaaggaaagaaggacatcgggtgctggagggtctgagtggggtccaggggccccaggcaggccaggagggacagcctggtgtcagctcagggagaaggcccaggcccatctcggctgggtggggtagggcccctccaggtagtgggggatgagctgtcacgggttgggccggactgagagcaacagaaccctgctgctgccctggccccaccttgtccagcacaggaggcccaagcctgggttgtctcccctctcacccacccatctctccctcccaaggaaaaagaagtgtgactactggatcaggacttttgttccaggttgccagcccggcgagttcacgctgggcaacattaagagtgagtcttgagtgaggtggggcactgagttggggctccggggagctgggtaggggcacagaccttcctgcccctccacacagatgtgttgtatggggagaagcccacgttgatgggctggggagggaggggacagctccctcctcccatccagggcagggctgacccctcaccgtccacgcctgcaggttaccctggattaacgagttacctcgtccgagtggtgagcaccaactacaaccagcatgctatggtgttcttcaagaaagtttctcaaaacagggagtacttcaagatcaccctctacggtgggtcctctcccatcccctcggggactggctcctgatcacacttagtgggaggggaggccggtcccccatgaggaagggatctgaggcctcatctactcattcaacgatatttatgtggtgtctgccagccactcactggccatcttggtcacagggagaaccaaggagctgacttcggaactaaaggagaacttcatccgcttctccaaatctctgggcctccctgaaaaccacatcgtcttccctgtcccaatcggtaatggccagtctggatgaggggacggggacatggggactgttcaggcaggatgcttccctaccagggatcagggagaggagggactccgtcctcagcttcagtcactggagcagtggatggtccaggagctccttggaagccactctgggcccaggaagactgtgccccaccccagggtctatgggactcccagggacccaggccgcaagtgctctttcctggcagtttagcccgggtctgcccagacaaggatttcaggcccaggcctgagtatccatttctcagtctcactggcctgacacctctggccaccctcccaggcccccttgttctgggccatctcccccgaccctcccaggcctcgtcaccctgggttttgctgtcctggctgtcctctctcccctggggacttgctcaccactgacttgggagctgtccttgactccagggagcctggcttgggcaggaggctccagccaggccattcagagagccactggcctcccccaggctgagagactgcctggactggtaaacaggcaggagacctgggtgcccgaggagcctgggagctgggcctcactcagggcagcccctccccaggcctttctcccacatcccctgccctgccatccacccctctgttgccccatctctgaaaggaacccccatatcttctgcagctgggccaggtggggcaggggctgcccaggggcagtgcagaggacctggcagtcagggatcacacacacacactcatacacgcacacacacacacagctgcctgttctgacggactttctccctaacagaccagtgtatcgacggctgagtgcacagtgagtgtggctgggcggctgcgagggggcttgtgggaggccagggtgcagtgggctgggggtcttgggcctgcctttgctcatccccctgccccccagcactgctgctgtctttattctgctgtccccatctcgggtgcctcccatttccccacccatcaccctcatatccacctctgtccagggtgccgccagctgccgcaccagcccgaacaccattgagggagctgggagaccctccccacagtgccacccatgcagctgctccccaggccaccccgctgatggagccccaccttgtctgctaaataaacatgtgccctcaggcc

SEQ ID NO: 772 - DNA, 107783 bp, Homo sapiens
gtgcgcgcccccgcggcggtgggcggggtccggggcggggccgcaggagcagtaggtgttagcagcttggtcgcgacaggtgcgctaggtagagcgccgggacctgtgacagggctggtagcagcgcagaggaaaggcggcttttagccaggtaagggccttctctctccacaaccggagagtgcgggaagaccccggcttctctccacaccctctttctccttcgacttttggggcggggggagtgcaaggagtgtgagtccctccccctcgagataaggggtcgagggacgctgatcctccgttctttcctcacttctggggcctgcgctgggtggggagtgcttatgtcgggctgagcctttgctgcccaagggcgggagctgcaaataccccgtcctctcccaccgagaacactgcattctaactgtatactttctggtgtggtggaggaaggtgacaattcattaaaactccaaataccctccttccagggaaatactgtaatattcaactgttctttttccttcattttcagccattccctctcttttcgattttttctcccttccattacgccagctgaactctgtttaagacacttacacccttttgaggaatgttgagaatatagcagtccttgcagccgatgtgtcatccccgaatcgctatcgtgtatatatcgctggcacttgcccccgacatatgttggtgttaatgtaaggtaattgtacacccctggctacacatactaaagcttgaagttgtagctgctaggaacgaaccatctggcacccttcctagcctccttactgatgcttgcaagaacggtttagctgatcctggtgagagatatttgaactactattgtcttgcacctaattccagctttcaaaagtctgccttggacgggcgcagtggctcacgcctataatcccaacactttgggaaactgaggcgggaggatcgcttgagcccaggtgtttgagaccagccaaggcaacttagcgagacccttgtctctacaaaaaaataaataaataaataaaaataaaagataagtctgcctaatccagatctgcctaatccagatggttcaattgacttgacttttcaggttagtcaaaggtaattagggagttatcagtttttaaggcaatgcccattttggggagaggttttcttttgcattaagtattctttcttttgctcttgatttaaatggtttaacacagtaccttttatctgcttggttaccaatactattcacaaatgctaaatatttcaggagccatgaaataacaccaatcctttcttctgaggtatgatgtagacacaaaagaacatgacccctaacaacatgttctaagttcctgtagaggtataacctgggtgcaggatgatcacgttttagatagatcttcaaaaaattatagagttggcgtgaaagaaggcaaaaaaaagtgtgtgttcatatatgttttcttgttttgcattgatagaacaacatataatgtactaggtaattagtttaggaacttatttcattctttggacaaaatattgagtgcctttcatgtcagtcctactgtagattcaaagtgccaaacgtctttaccctaaaagaacttaaaatcaaatgggttagacagatccacatacaatttatggtattagtgaggtcatttctatactagaggtcagcccagggtactgtaggagcatagggaatataggtgttttgttttgttttttaattctctcttctgcttttccttaaaaacaaaaacctctgagtaataatgagtgattctcttcaatctatgtatttgtatcactttcatatttcttaccctctcttcctccaattctatggcctatggaaaatgggattagaccctgttgttaatgtggcatttagtaaatagttggatctgtttccactgttctgtattgggctgggaagtgttgttatcaggtagtccctgggaagagaacagtatattggcaacattagcaaaggagtgccattttgtaaaaattacctcattgtataactttctttaacttggtacactcaagctttgttccagactctggttaaaggtggggctaaatttcaacctaataattctaaaagaaagcttcagaagctaaaacaattcacatcttggtgacaggggatactttttcctgctaagatgccctcaaaatgtttttctctttctttttttcttgggtggggaagacagggtagataggtgggtggggaaaaatgtttttaagtataattttgactagtgtttcttcaggtttcaaattcttatattttctctggtatttttcaccagttaactgcaattaacttagagccctcgtaccaaaaaaatttatcaaagacacacacacagacacaaaagaatattgagagtgtgggagttcattagacatctttggcataatagggcacctaaccacaaattggaagaatttattatttaaattgacagtgaaactagtttcaggcattcttaattccatacactattagatagatgacttttagattagaattgtaccctttctgcagataggaaaatgtataacgagtcctaagttagtaatttccattagaaaaggcaattgttttttaagtttgctattgtctttcactgtatgttttttgatagaaacttaaggtacttcattttagattgcatacagtaatctccaggtgaggttacttaacacagcctcttcaggttactaacaaaccagtggttgtaaatgaagtagtttctacttaatgattatggagttgagagtctatggtggatgataaggtaggaccatactgatgagtttattctgaagctgggtgcagagtcctcaagactcagtcaaattattgtgctactgaagacctcttttcataaaaaggatggagtttgacctaacaagcaatccattattcagcatgtcagatgatttcttgacacgtgaaaactttctagagacttcctgtgtccactcataagaagttaacatgataccatgaaaattttacattcttttgatgttcttttaaataatttcttaatactactaccctgggccgggcgcggtggctcacgcctgtaatcccagcactttgggaggccgaggcgggaggatcacgaggtcaggagatcgagaccatcctagctaacatggtgaaacccagtctctactaaaaatacaaaaacaaaattagccgggcgtggtggcaggcgcctgtagtcctagctactcgggaggctgaggcgggagaatggcgtgaacccgggaggcggagcttgcagtgagcggagatcgcgccactgcactccagcctgcgtgacagagtgagactccgtctcaaaaaaaaaaaaaaaaaaaaaaaaaaaatactactaccctgaaactaagaactttcatctttaggggaaaaaaagatgcaacttttttgtacttctgataacaagtgtggatctattttcccccttaattattctgtaacagagtttatgatatggaaaactttacagtccttcaaatatgttttgtcttgcacaaagtattgccatttttgtttcattacccataaattagtcccaatatccgctttacttagttttagatttccacaatcttttttttctccataaactgaaattcaagctaatgccccgggacttcttttatttcatagtcagttttactaaacaggtaacatttgctcagctttggcgtctgagcaaaaatttggcttccagcactacaggaaagctgtctgtccatgcatagtatccagtggtttctgtctaacggtccttaccccttggcaataactgaccaagtgaacaacttgtctagttcttcctttcatttgcttttcttgacatgactactatctggttctccattttctaatctaaccacttactcccatgatccattaactcagtctttttgccccttaaatgccgggttcaccatagccctgctcagcttcctattctcactatactttctccctttataatctgatttctttccatgacttccactatcacctccatgtaagtggcctgaaaatttatctttttaaaaaacttctttcatattgtatatataattgttttattttcatatatgccaacacatttaaaaataaaaattatagatatttatattattataaaataaaaattatatatgtttattatagaaaatgtggaaaaaacaggccgggtgtgatggctcatgcctgtaatcccagcactttgggaggctgaggcgggtgatcacttgaggtcaggagttcgagaccagcctggccaacatagtgaaaccccatctctactaaaaatacaaaaattagctgggcatggtggcgcatgcctgtagtcccagctactaaggaggctgaagcaggagaatcccttgaacccaggaggcagaggttgcagagagccaagctcatgccactgcactccagcctgggtgacaaagcaagactccatatcaaaaaaaaaaaaagaaaagaaaagaaaaaaagaaaatgtggaaaaaacaaattataaagaagacaaaataacccatattccataatctgttccagagagatctatcatttgatatatttcctttcagtggttttgttttctttgatatacacacactcacataaacacaaaggtaattgaactcatactgttgcagtagatatagttttgtgtctgctttttttgctttatattatttttcatagcatcaaaaatttttgaaaacatttaaatggatatttaatctccattgtaatctatttaataatttattatattgaggttgcataatttatttgtgttttggttttacattaaatgaaaacaattgagaacaaatttatgcataaatctttgtgcaaatgactcattatttccttaggttagattcccagaggttgaattaccaggtcaaggagtgtgaaaatttaaaaatactaaacctgctcccaaattgctttttgtaaagattagactaattaacattctcaactgcagtgattgtgagtgcccatcttagtgcggccttggtaacattgaatattattattatgatgatttttgagatggagtctcgctctgtcgcccaggctggagtgcagtggcacgatctctgctcactgcaagctccacgtcccgggttcatgccattctcctgcctcagactcctgagtagctgggactacaggtgcccgccaccacacctggctatttttttttttatttttagtagagatggggtttcaccgtgttagccaggatggtctcaatctcctgaccttgtgatccgcccacctcggcctcccaaagtgctgggattacaggcatgagccacctcgcccagcccgtctggctaatttttgtgttttttagtagagacagggtttcaccctgttgatcaggctgacctcaagcccctgacctcaggagatctgcccacctcggcctcccaaagtgctgggattacagcatgagccaccgcgcccggcccgaatattattttttaatctttactaatttgataggcagaaatgaattaatttgtatttctttgctagtgagagagaacatttttcatacattcatttctgtttcttctgtgaattatgtctgggttaatcccactcccatttttatttgggcgttaacattttaattatgttggttttttgtttggtattcttttatttggagcgttttgtgggggaagcacaggcttttattagaccaaatagagtgaatggagtgacaaagtggaaagtatacagaagttggaattgtggtgttataaatgcccattgttttgaggggccagagcttgtgatcaatgaagcagtactgcagaatggaaagggtgctatttgagagtcaggattcccaacttaatgttgtcatcaaccaatcaggtgatcttggacaagtcattgattcattgactcagagcctcatctgtaaaatgagagggttgggcttttgatccccaagactggacaacctctgtgctgaaaggatgcctttggagctactactgttcactagacattctggaattactttctgtctcatctctaacctttcacctaattttagatatatagagcctgaggaaagactggatgcagtaaaggcagtgtccaccggagtagcaaggggagcctggggacagcttaatttgtttgtgccctttaactttcaggaaaatagaagtataaaaaaaaaattgaatggggttcttgctgtgggggttgggggaagaaaagaaaaaaaaagaagtcaaaaagattggtatttttttaggcactcccatagactgacacttggaaactggtaagataaaatcacagaagccctgctgacctgtgccacaaaactcgattatctacaatgtatgtgaaaaatgtctcattttgtgactagagggtgtacgtctccaaggcaagttatttaacaacttcttctacttcatacagaaccattcttagtgtttttctttgagattggtataaactcttctaagaatattaattttttgtcctgtggtcaaatatttaaccagtttgccttttaattttgtatatagtatattattacttatctatagatttttttttttttgagacagtgtgtcactcagtcacccaggctggagtgcagtggcacaatctcggctcactctagcctcctcctccagggttcaagtgattctcatgcctcagcctcccaagtagctgggattacaggcacatgccaccacgcctagctaatttttgtatttttagtagagacagggtttctccatattggccaggctggtcttgaactcctgacccaggtaatctgcccgcctcggccttccaaagtgttacaattacaggcgtgagccaccacacccagcctggatttttaaatttgagatttcttctggtgctgtgatgtttagaaggccttcaccatccagagattggttaaatactcactttcatttccttctgatttttaccgttttacactttatatttaattctttaatttgtattgaacttactttgaagtaccaaaccaatatgtttaatgcctttgtatatctgagttccagatctgtatttccagctacctgttaggctatgtggatagtccctgtacgccatgcatctgcgtacacccagattcactaaggagaaagcttgaggttgtacttaccactttaatacttttctccacccacatttgatcaatccccaagtttggctgattctgccccaggggtgataagagttctttaatcagtcttctaattcagattccccttttagttttttgccagagtccttgagtccttgagtaatccttagagttggcttcagtttttcccttgcagaaaagttatcagagttgtcataaaaaaaaaaagcactgattttcaaaatatggttcctttaattgcctgtgttagaattacctggcagtggttaaaaaggtagagtctcaggtcccacctagacctgcagatcagtgtgtctgagggatgggcctgggaacctgaagtttatcaagtacctcaagagatttatatacaaacttaaggggagacaatgcctaagtaaattcagtctagctttctgacatgctcttcaagacacccacacccccactctgacagcctattcttttaggcttatctcccacaacacgacccacccacctggcactgtgaccctacaataattctctgtttcctggacctgcccagttctttcctgcctctgtgcctttgctcatgcagttaccacagcctcatgctcctccccttccccaccctcttgttgaaatccttttccttaagagcccaaatcaaatgctacctttttaaatttttttaataaaaaaaagccttttctaatttcttctacttgaatcagtggctgcctccccagtctttatacttaacacttgatttttgcttcatttcttaccttacttaatgttgtcactatttataaattattgcttccttgtaagattacaagccttttaggtatgagaacctttcccttccttttcattttgtggccattatgcacatataaacaattaagaactcattttattttattattttgagacacagtttcattctgtcccaggttggagtgcaatggcgcaatctcagctcactgcaacccccacctcctgggttcaggtgattctcatgcctcagacctccggagtagctgggactacaggcacgcgccaccacgcctggctaattttgttttttttttgtattattagtagagacagggtttcaccatgttggccaggctggtctagaactcctggcctcaagtgatctgcccacctcagcttcccaaagtgctgggattataggcatgagccaccgcacctggccaaagtactcatttagtacatgaaatatatctgatcttgcaaacacacttttatataataatgtttggctttgtatcacacatagaataaaattaaaatcctttagcattgttattaatccgtatttaatctgactactactcatctctgtgtcatcgcatgcttctcacttacttcctagctgtattattccttcctcagggcctttgcatttgctttcctctacctggaaaactcccccatctattgtcttcaccttgctggctgcatatgttctccccatcattcaggtttcagttcaaatgtcattcactcaatgaggccttccctgatcactgcctaaagaagctgttcgtgtccctgttcctaccacaactccagttactctttttgtatttccttcacaccactaatcacagtctttaattgtccggcttctccagtggaatggaaatttcatgagagtagagaccatgtctgtcttttttttttttgagatggagcctcactctgtcacccagggtggagtggaatggcacgatcttgactcactgcaacctccaactcccaggttcaagagtctcctgcttcagcctcccaagtagctgggactccaggcacctgccaccacacccagctaaattttttatttttggtagcgacaggatttcaccatgttggccaggatggtctgcatctctcgacctcattatccgcctgccttggcctctcaaagtgctgggattacaggcgtgagccatcgcgctcggccttgtctgtcatttttaacattatatcttcagcacttggaatactgccaaagacttggtaaatgctaaataaatatttgttgaatgaatgaataagccttgaagatggacttttcatttggacaagtcttgttttgttttgcaatccaaagtgttgtattttttttaactggacaacagctgaggtcggtccatctgggttcaaatcaggtagcagtctctgaggagttcggaaggtagcaggacaaaagtttggatactgtgacaaccaggattaagttccatctgagtgcaagttttctaaggtgtttccaggatccaggccactattttcctaccactatagccatctacttcccagattgttactctggattatactagtctatcaactcctattacattttcaaaagccagtgtggcaaaactaaaacccaattactggaatccacaaacaaccagaagttttcttctgttttcattctctaggagaaaaattagaaagctatctagaatcttcaagaaaaaatgaaatgattttcattatacttactattaacacatgctctgaaatgtgttactgtttagacacactgtttagacagtgtactgattagaaagattttcagcaacagctttaaacaaaaggtttcttattaacatctagttgaaccagacattataatgaattagttctaatttctatttcttttcattggttagtcttttttaattccattttttttcttaatgctggcttgaagttttatttaaaataatgctttgtagagtagctgacagttttcaaagtacttttgcttttatcctttcatttagtcctcataagcatcctgtgtgaatcaatacctgtttttgagatgaagaaattgaggcccaaagacagtgatgatctttcccctgccaactgaaagaccactacccagcaaatgcctctcaataactattttctacagtcccgaattaaatgtagcttttagaagctaatcattaaaattcaattgaaacagtaacattaatatgtttataaccaggccaggtgtggtggctcacgcctgtaatcccagcactttaggaggccaaggctggcggatcacttgaggtcaggagttcgagaccagcctggctaacatggcaaaactccgtctctactaaaattacaaaaattagcctgggagagagagtaaggctccctcttaaaaaaaaatgtttataaccaattctttttttttttttttgagacagagtcttgctctgttgtccaggctagagtgcagtggtgtgatctctgctcactgcaagctccacctcctgggttcacgccattctcctgccttagcctcccgagtagctgggactacaggcgcccgccacaacgcccggctaattttttgtattttttttagtagagaaggggtttcaccatgttagccaggatggtctcgatctcctgacctcgtgatctgcctgcctcggcctcccaaagtgctgggattacaggggtgaaccaccacgcccggccctataaccaattcttaataagatacctagcactggtccagataagtagccaaattttatcacttgtgtggcggtgtgatttggtacatctttatgtgatcagcctcagtgatgcttgtcctttattaaggcattgttacgtggtagctgctcagattttttttttttttttttgagacggagtttcgctcttgttgcccaggctggaatgcaatggcacgagctcggctcactgcaacctccacctcccgggttcaagcaattctcctgcctcagcctcccgagtagctggaattacaggcatgcaccaccatgcctggctaatttttttgtatttttggtacagacggcgtttctccatgttggtcaggctgatctcgaactcccgacctcaggtgatccgcccgcctcggtctcccaaagtgctgggattataggaatgagccaccgtgcccggccagcttctcttttaaagaaaggaaggattaaagaacttgcctagagaagagtcactttttagtaaatccattttaattctcctgcttgaaggtattggttaaactgatctgaactgactcttcagattgagcaagtcctgaaaaacagcacatcatctaaaatttcagataagaatggaagccaggcccttcctggaaatgtccagaagtgaaactaagaagccctgtatttggagaaaacttgattagttattaaggacaaagggctgctttaagaaggttatatctttaacagaaggagccttcctaaaataagcgtatgtgtttcttttgctttgagattgtaaagaaggctccttaatgaactattttgccttaattaagcatgtaattggcaagacttatgagcatgtagtttctcggcagattttcagttatgtaggtgggcctttgctgagatgtgtggcaattcagtactagtgtaacactgtttttcattcatataacagatatttattgagcccctacatgttccaggcactggtattcagtacatctgatgttaaagtatggaaaggtacaaaggttaaaggagaaatatgctgttcagaggaagtctgtgctttgtcgtgatggtcttggtcaattgtaaatttccacattctttttctaattagctatgtttttctctactctttaccttaaatttgaagctagtgacttaatgatctgtttttctacttactgaaagagatttttcttactatgtgtgaaaaaaaactactggaaaaataagaaaacctcacttcgttggattatgtttgcccttagaataagttaatgatcagctgggacggggagggaaagaaccaaatgagcaaataacaaattttattaattgggagagaggtggagttagacttgaatttgatctggtaattttttaatttaaagggaaaaaaaaaagattaggaaagttcttgggtggttcttcatgacctacaaattttagaccaaagtcagttgtttttgtttttcaagatagagtcttgccctgtcgccgaggctggagtgcagtggcatagtcacggctcactgcagcctcaaactcctgggctcaagtgatcctcccaccttagcctcccaaagtgctgggattacaggcgtaagccacagcacctggcccaaagtcagttttttgtttgtttgtttgttttgagacggagtctcgctctgtcgcccaggctggagtgcagtggcacgatctcggctcactgcaagctccgcctcctgggttcatgccattctcctgcctcagcctcccgagtaattgggaccataggcacccgccaccacgcccggctaattttttgtgtttttagtagagacggggtttcactgtgttagccaggatggtcttgatctcctgacctcgtcatccgcccacctcggcctcccaaagtgctgggattacaggtgcccaaagtcagttttcaaaggctgtaactggggttactcttttttacctgtctaaataagatatgtgaagattaccacaattatgtaaaaaactaatttggggttcataagcacaagaagataagatattcacacaaatgaataaggtaatagaagccctgtgggaaggttatagttatgttctcttcaacatagagttctttttttttttttttttttttttttgagataaggtctcactctgttgcccaggctggagtgcagtggcgtgatctggattcactgcaacctccacctccaaggctgaagcaatcctcccacctcagccttctgagtagctgggattacaggctcaagccaccacacctggctaacttatttgtttgtactttttgtagagatggggttttgccatttttcccaggctggtcttgaactcctgaactcaagcaatctatcctccttggtctcccagagtgctgggattacaggcgtgagccactgtgcctggcccaacttagagttcttacagaggtgttgatgcgttgataacacctaaaattttatcccttttttttttttttttttttttttttgacagagtttcactcttgttgcccaggctagagtacaatggcgcgatctcggctcatcgcaacttctgccacccgggttcaagagattctcctgcctcagccttcccgagtagctggaattacaggcacgtgctaccacacctggctaattttgtatttttagtagagacggggtttctccacgttggtcaggctggtcttgaactcccgacctcaggtgatccgcccacctcggcctcccagagtgctgagattacagtcataagccaccgtgcctagcctttttaaattttttttttttttttttttttatttgacggagttttgctcttgttgcccaggttggagtgcaatggtgtgatctcagttcactgcaacccccgcctcccaggttcaagcgattctcttgccttagcctcccaagtagttgggattacagacatgtgccaccacacccggctaattttttgtatttttagtagagacggggtttctccatgttggtcagctggtctcaaacttgtgacctcaggtgatcctcccgcctcggcctcccaaagtgctgagattacaggcatgagccactgcgcccgctcctaaaattttatccttaagagagataacttttaccgatttagactttatggtgcagagaaatggtgtcaggtctttgatcagatctggtgttcctggtagtaaccatcagtttctcagatattattacattagagatattctctttttattggtgatttaacagaaataagctgaccctgaaatatcatgtacgctagaactgcttttctggtttattttccgtgctgcagatcattttgtttccaggccaacctcctaaaaaatgaaaagagctaacatttatttaacttctttgggcctcagtttcttcatctgaatattattcaataatacacttacataaagtgagtcggtaataattctgagtgtgttactgtgaagattaaataagttatatatgcaaaacaattaagacagtatctgacacatggtaaatggtcaataaatgttaggtatttttattaccaccactgctatcattattaagtacttattttagcaatgtgctaagagaacattttagtgatgatgaaactaaggcttagagtaattttcctcatgttacccagtaagtgtgtggtagactcaatatgtagacttgagccaaaaggagccttgggtagagttggcttagatgtggaataggctggggcatctggcccagcctttaatattcctagtttcaagactcttaaaggataagaccggtccagacagcccctaaataccgggaagatgtggtttgtaatatgtcattagaacatggacattatggtctgtgggattgtttcaaatcctagctctatcagttattagctctgtgaccttgagcaagttattgaacatttctagagccttagtttcttcctctgtaaaatgagaataataaatatttgctgacccagtgtggtggctcatgcctataatcccagcactttgggaggccaaggtgggaggatcgcttgagcccaggagttcaagacgagcctgggcaacatagcaagaccctgtctcttacaataataataataataataataattgcttcatggcagtgtaagaattaagtgaataagatcaaatggaatgagataacatgtaaagcacctggcatatggccagtactcaataaccaatcctcaggcttatgcttaaggggttcaaacttgtacctgattctgacattatctgtctagatggtgagcgtttagggtctgggtctgcaaaaattaacatgtttggactccatatgagaggttcagattccataggtgatcctgatactcagagtaccacccttatctgaaagcactagactgggtggtggagggtagcagcagtgatcctctctcaatgcctgggctgtcagtgtccgtcaggcttcttacagggttgtgctctgcttagaatattaatgagcagtcaggggtgggtgtcctgcaaaagggaaccccgcagaaacgaggcactcatctgtatagtcaagcggcatttttgtttggaaagaatattaatgagatctggataagaatcagacaccaggaaaggacagctgctgtgagaggcaaatccaattgtacaaggagttacacatgatattcagaaagtccttgtataatttaaaaaaaagtaagttgtagagataataaacaatttataaatgtcgttaaaaaaataaatgtggccgggcacggtggcttacacctgtaaccccagcagttagggaggcagaagtgagagataggttgaggctaggagtttgaggccagcctgggcaacatagtgagacctcattcttcaccaaaagaaaaaataggcaggctgggtgtggtggctcatgcctgtaatcccagcactttgggaggccgaggcaggtggatcacaaggtcaagagatcaaaaccatcctggccaacatggtgaaaccccgcctctactaaaaatacaaaaattcactgggtgtggtggcatgcacctgtagtcccaactactcaggaggctgaggcaggagaattgcttgaacccaggaagtggaggttgtagtgagccaaaattgcaccactgcactccagcctggcgacagagcgagactctgtctcaaaaaaaaaaagtaaatgtggccagggggcacggtgattcacacctgtaatcccagcactttgggaggccaaggagggtggatcatctgaggtcagaagttcgagaccagcctggccaacatggtgaaaccctatctctaaaaaaaaatacaaaaattagctgggcgtgaccgggtgcggtggctcacgtctgtaatcccagcactttgggaggccaaggcaggtggatcacgaggtcagcagatcgagaccatcctggctaacacggtgaaaccccatctctactaaaaatacatataaaattagccggacattgtgggggatgcctgtagtcccagctacttgggaggctgaggcagaagaatggcgtgaacccgggagatggagcttgcagtgagccgagattgcgcaactgcactccagcctgggcgacagagctagactccgtctcaaaaaataataataaaaataaaaaaattagctgggcatggtggcacgccccggtaatcccagctactcaggaggctaaggcaggagaatcactggaacccaggaggcagaggctgcagtgagccaagatcaggccactgcactccagcctgggtgacagagtgagactctgtctcagaataaaaaaaaagtaaatgtattgagtggccaacacatatttgaaaatatgctcaacctcactcatgattaaaggagtgaaaactaaaacaataatgtaccattttcacacatctatcagattggaaaaaataaaaataatgcttattactgacaagaatgtggagaaagattcaaatataaatggatgtgacttttttgagggaaatctcagaatatctatttaaaaatttaatgcataggccttttaaactagaaatgctccttctaggaatttatgccgtagatgcaccccgccccaggtaggcaatagtacaagcatgtttgttccattcttattcataacagtgaagaagcaaaagcaacctacatgatcatccacaggggccttgttaaataggttttaaactattacagaatgaaatattatgaggtactgaaagattgagatagatctgtatgccctgaggtgggaagatgttcaagaggaaataaataattgctgaacagcacattaacatgaaaccattgtatttctaaaacatgtttgtatttatgcatgttgtgtgtcaatttctctgtgcctcagttttctcatctgtaaaataggcatcctgatggtacctacctcatgacttgttgcaagggtaaactgagataacatatgtagagtgcttagtacagtgactgacacatagtgctttgtggtggcaattattattgtataggtaataacagaaagtttatgctccagactttgacagaggttacctttgagaagtagaattggtttggggggagggcagacaagagctggcagggacttctacttcttacattgtgtatttccatagcattgtttatatggagcaggcccatccctggccagtcactgaccgaggagcctagacagtgaaggaagtggcagctctgtaggctcaacaagtaggcttgttgagacctgcagaagaaggttccccatgggaaggaggaggataaggaagggtggtgctgtgtggagatgggaaggatgtttgtggattccaccatggctactgaagttttttttttgaaaaccacctgacctaattaaagatttaaaaaatttacattgcacaagaaccttacaaagcccagcttgtatttggacttatcctttttataattcactaagttatatttatactaaaaaagtgatttgtgtttaatttgacttttgaataaaaactacagaaaataattggtcaaagtgctcaaaacaaacattttaaaaaatgggtagtttttctaataattatgaaataaaaatattgatattttaaagaaacaatttctcttcaactaatgttactacttccattatatagtgatgagcaattttttttttttttgagatggaattttgttcttgttgcccaggctggtgtgcaatggtgtgatcttggctcaccgcaacctccaccttcctggttcaagcaattctcctgcctcagcctcccaagtagctgggattacaggcatgcgccaccacgcccggctaattttgtatttttagtagagatggggtttctccatgttggtcagactggtctcgaactcctgacctcaggtgatctgcccaccttggcctcccaaagtgctgggattacaggcatgagccaccaccctggccagccatgttttaaataatgacagcaactttcaagctaaaaagtcaaacagctgaagcaaatgtaacatttttgatttttttttttttttgagacggtctcactctgttgcccaggctggaatgcagtggcaccatcacagctcactgcagcctcaatctcctaggctcaggcaatcttcccacttcagcctgtcaagtagctggaaccacaggcacccaccaccacacccggctaattattaaaattttttgtagagatggagtctcaccatcatgcccaggctgatcttgaactctggactcaagtgatcctcccacctcagcctcccgaagtgttaggattacaggtgtgagccactgtgcctggccatgaattatttttaatcacagccttattgatctaaaccttgttaagtcaatatgacacataaagtaagctaaacccaaataggagttctagtatctgaacctttagaataatgtttattgaatgtggcttagactctgaagcatgcgaagactgacaagatctgcctctgacctcaagcaatgtgctgggcactgttttacatttattgtctcctttagtttaaaacaaccccgtaaggcagatttatcatcttccttttacatagaaggaaagtaaagtacagagaggttgccatgcatctggtaaacactagaatgggaattggaaccagctgctatttccattctactgtcctgcctccagagggtcatggggtaagggtgggcaaggtgagccctgggggggccacatgagaattctcagggacctcagtgatcatctgtcatcgagtctaatgattttcaagccattgtttaaaaattataaagttttattgaaaaattatataccatacaattcacctatttaaaatgctcagttcagcggttttaatatggtcacacagttgtgcagccatcaccataatcaattttacaacattttatcaccttccagagaaaattcatacccatcagcagtcagttccttgtcttcctactgccagtcccaggcaaccactaattctttttctgtctctatagattttcctgttctggacctttcatataaatgtaatcatacagtaaatggtcttttgtggctggctcctgtcacttagcttaatattttcagggttcatccatgttgtagcatgtgtcagcactacattactctttatagccgaataatattcccttgtatgggcataccacattttgttcatcctttcatcagttgacgaacatttgtgtacaagttctgtgtggacatgtgttttcatttctcttgagtatatatatatatatacatactttatatatatatatatactttatatatatatatatatatactctctatatatatatatatatactctctctatatatatatagacacacacacacacacacacacacacacagaggaatggaattgctggatcccatggtaactctgtgtttaatcttttgaggaaccaccagactgttttccaaagtggctgcaccattttacattcccaccagcagtgtataacggttccagtttctccacgtcctcgctaacacttgtcaaactatattttaactataccccacaataagaaatattttacattcctactcagtttatacacatacaaataactgaaacaaaaactttagaaaaaacctacctatactatgtctgatgcactttgacattttcgattgcattctgttctttttcatcaaaacaaacatgttgcttctgatcgctcaagttgcttttacaactcactaattgtgacctgcagctagaaaaacactaggctattttaaccccttcattttgcacaagaagaaagaggacccagagaagtggcttgttcatggccataccactaattagtggcagattcaaaatgagagcacaagcctgttggctccctgctttaactttgacctctcagtaaattatagttgcccttttattcggtagataaaaataaaatagtttctattttttaagcttcttatctttctcaagcagcattttaaattcagcaacagacctggctagaggaaaaaaaagaatgagaataactcaattttattatcacgagtcattgttttaacacaatgattttgtgccgtctggacagaaaagtactaggtgaacctagatgatgggcatcaaattaggcagattgaattaatcagtgcagtgtctcagattcatttttgtccaaacctcagtgtacttttaaagagcagccattttccttacactgtcaaatttgaatggcaacatgaaattgaagtgggcaatataagaaatattttatgttgctgtctttccatttttcttagaatacatgtaggtcttaaaccctttacttacttatttttgagtcagagtcttgctctgttgcccaggctggagtgcaatggtgtgatcatggcccactgcagccttgacctcctgggctcaagtgatcctcctgtttcagccaagtagcaaggatcacaggcatgcaccaccatgcccagttaatttttattttattttattttattttattttattttattttattttattttactttattttttggcagagaacaggtctcgccatattgcctaggctggtctggaacttctgaccttaagcggtcctgtctcctcagcctcccaaagtgctaagattacaggcatgagccactgtgcccagccttaaaccctttaattcagtgttttccagcatttgatgagggaacctctgacactagagttgcttcaacgttcttcttattaaaatgtgggttttttgagcccttctccagacctaatgaatcagaatcatgggatgggacctgaaaaatcagtattgtatacaagtttcctaagtgattctatgtacactcaaatttgtgaccaactgaattaagtgtttttccccctttatttctcatcttccttttggtttctaaaattactatttggctttgttacctgtagagccaaatagtaattcattagcatttataagaaaacacctaaattatctcagtagaaggagttaactaaaacaatattgatgggtttcagttttattctaccttagtagaatactggagaccatttttttgatggctatctccactggtttcccataccttggaatgatttattttggaataaacatatacaacctactctattgtttgatttcttttccccagaaacactagtctctaaaaatagctgaatccaaaaaattatttcagatgcctgggatccctctcttcattaacaaatacttgagtgccccccatgtgtcaggcactgttctgcaagttaaaatacagtgtgattttaaaaaattacagtgtgagccaggcacagtgactcacacctgtaatcccagcactttgggaggttgagctgggaggatcgcttgagcccaggagttcgaggctgcaataattatgatcacaccactgcgttccagcctgggagataagagtgagaccttgtctcagaaaaaaaattaccatctgatcaggtagggataggtctaatactttgagaacttatagggaaccttttagcccaagcttgaggggtcagggaaggcatctggaacaaagtgtcacccaagctgggacccatagcagaaggccagggaggctcaagcattttcagacagagggtagcagtgtcctcggggggagtagtgtgctcagagaatggcttgcatcaagaaataacttgagcatacctaaagatgtgaggaaaagcttgtgcaaaatccatatgtgcaaagctttgtccaattttattcaagctgcatttatagagttccttctatttagaaagcaatacactatcacgcctctaatcccagcacttggggaggttgtggtgggcagatcacgaggtcaggagatggagaccatcctggctaacacggtgaaacccatctctactgaaaaatacaaaaaattagctgggcgtggtggtgggcacctgtagtcccagctactcgggaggctaaggcaggagaatgacgtgaacccgggaggcggagcttgcagtgagcccagatcacgccactgccctccagcctgggcgacagagcgagactccatctcaaaaaaaaaaaaaaaaaaaaaaaaaaaatatactagatggcagaaaagcaaaagacaaaaaaagcagggagaggggtaaaatagcatttactgataagtaaataagtaaataaatgacttccttttttttttttttttttggggcaagttattaaacttgcccaagatcactcagctagtgttcgtggtgagagatctcaacagctaaattctaatccatgccccatgcccttagcctcttgctattttctttccaaaatgtgtccctgtgttaggcattttatatagaatttttgactagctagggtaggtaatggtatatgcctcagagaagtaaagaaacttgcacatgtcaccacagttagaggcccagtgagaacctgtaagttctccttttaacttcaaactttgtgtacattttgttatactatgttatgtgttattttatttgatagaagcaaaaattcatataccaattctttggagaaaaatgatttgtaattaaatgaacttaatttgaagagtagaggttaagaaaggataatacatatgatttgggttatgttacgttgcatattggacatatgaaactatccagcatggagtagaaattctaggactgggctgggcgtggtggctcacgcctctaatcccagcactttgggaggccgaggcgggtggctcactagaggtcaggagttcgagaccagcctggccaacatggtgaaacctcgtctctactaaaaatacaaaaacttagccgggtatggtggtgagcacctgtaatcccagctattcggaaggctgaggcaggagaatcacttgaacccaggaggcggaagttgcagtgagccaagattgcgacattgcactccagcatgggcaacaagagtgaaactctgtctaaaaaaaaaaaaaaaaaagaaactctaggagtggaagccaggaaagttaggccttaggatccagctttgggaatcatgtggaataagtgacttttgatgagttgagagtaagtgagctcgctcagagaagggagagagactgactctttattgattcctgggagtaagagtggaggtaggaaaagaggattctgcaagaaaagagaaaagtggaatttattctcaattacacagcctcatttttgttgcttttgctctgggtcttagtgtttttgaaggcacaaaatatcctttaaaaggcgataaagagatcaaatattattgaagtgagtctgtcctgatgtaaacatttacattcttgttgacccctgggaatttggtcaatgttacaattgtgctattgtctagattcatgtttctacacatacctgaagctcttccaagaacagtagcagtgattattctaacatgcctgcagacttgtctatcatcatgtttctgaataatagagtagtgagctttttatttataacatttgatgttatttagtggttccatttttttatattgtgagtttatatgagagtttgaataagctaaaattactgggtaattcacagttctgaaaaatatatgcttcctcataactagtcttgggactgcaggataagcattcagtttctgtactaattgtgtttcagataaaacttaaagctatgtgtaattttatggaaggcgtatttatagagttctttctatttagaaagcaatgtattaaatactagatgtcagaaggttaaaagacaaagtagatctgtcttctgacttcaaatatcttgctattgagtaggaattatgaaattattataaggcagggggattgacttatgctgattaggaatagggctagggcagtttggaaaagggccatgtgtgttctttcacttgagtcttttaaggtgaataggttgagtacgggataacatttcaaatggagtgaaaaaaatatacggtgtatcatgggaggagaagctggttatggcataattttagagattctagatctgttttcagaaatcaaagttctgtggggttaggctttttactatcagagaaagaagttataaataagccaagagggaatactagaatgaaccttgtgatgctagactggagtcagaaatatcagtatgaatttatagtttataaaatttttatagggctgggcgcggtgactcacacctgtaatcccagcactttggggggccgaggtgggcagatcacgaggtcaagagatcgagaccatcctggccaacatggtgaaaccctgtctctactaaaaatacaaaaattactcgggtgtggtggcgcatgcctgcggtcccagctactcagaaggctgaggcaggagagtggcttgaagccgggaggcagaggttgcagtgagccgagatcgcaccactgcactccagcctggtgacagagtgagactccatctcagaaaaaaaaaaaaaaaaaaaaaaaaagtataggtagatatagagctaaataaagaaatgtgtgcctataggccaggcacagtggctcacacctataatcccagcactttgggaggctgaggcgtgaggatcacttaggcccaggagtttgacaccagcctggacaatacggggagactctgtctctacaaaaaaatttaaaatattagccaggcgcggtggcatgtgtctagtcccagctacttggcaggctgaggtgggaggatcatttgtgctcaggaggtaggctgcagtgagctgtgattgcaccactgcagtccagcctgggtgacagtggattctgtcacacacacacacacacacacaaaaagcagtgtgtatacatgggccagtatacatacatataattcttggttttgtccactaagacgcctagaagcagtgacatctcagtggcaatgagcataactagtagtgcccagatgctaacttctcccataaaagaaaacagggctccttggggaaatagttgattccagggctgaggcatggtaaatacaagacgagcctggaacatcttgcagtgctagaaagtaaggaagtgctaaaaacaaaacaaacaaaaaacagggcaagttgagagaacactggagccaagccaaaaactccaagagctggaacaatttaagcaataaaataaggatagtattggattataatacagggaataaagtaactatctatgaaaccatcctaatataaataaatggttgggctggacgtggtggctcatgcctgtaatcctagcactttggagggccgaagcaggaagatcatcttgtggcatactgccaaggttactacttgagaccatcactatgacagttactactgttactacttgagaccatcattataagactgaactaagggtgtggaaagcagaaatgaaaacttaaaagtaactattttaaaggaaggggtcagaggaagaaaaagagagttccctgcttctagtgagcaaaggcagcccactgagcttccacagccctttgtatttattgggtagaaagagcagggaggaggaggtaacgattggtcagctgcttaattgatcacaggttcatattactgttaacaggtatcaattatgcctaatcacaagaaacactgctggtgtgactgccctcagcattccttctgggtggcagatgcaatttgtcagtttgccaacattctgcattcatgagaacagtttgctgtttactcatatagcctccagtggtatactgagttgatcacgaccctcactctttcggccttcaacatcatctgagctcaggaatttgagaccagcctggacaacatagggagacttcatctctatgtaaatggttctaagtaatgtaaaatcttctaagtaaatggttgaataaatgagggagaacaaatcttcgttatagaagaatttcaattaataaatgtagaaaggatgacagtaacagaaaatcaccattagaataccagtaataattgccataagcaagacacacccatgaatgctaaaattaatgggaaaaagtttaaggagaaacagagtcaaagttctccctcataatatttatgaattacaaagggaaaacaaataataactttacagaggagaaacctgatataccacattaaccatgtgatcaaggctaatgtcgtgagtaataagacatcacatcaacatcacgtaccctctgatatgatgcactgtgaagggaacatcaactctggattattcctttcaaacatttataatctcaatctaatctgagaaaatatcatgttttttaaaaaaacttttttttgttttgtcttttgagtattgcaagatgttccaggctgatcttgtatttgcccttccccagctctggaatcaaccgcttctccaaggagtcttgattctattttattggagaaaccaagaaacccaaattgaggaacattctacataatatctgaccaatactttcaacaatatcgaggtcatgaaagacaaggaaaagcagagtaactgtcatagattggggtagacttaggaagacacgacaactaaatgcagtgtatgatcctgaaacagaaataagacgttaattaaaaaactggtggaatttcaataaagtctatagttaatagtattgtaccagtgctcatttcttagttttgctaattgtactatggtaatataagataaagctaggtgaaatgtatatgggaactcttgtactgtttttgcaactcttatgtatgaaattgtttcagaataaaaggtgagtgctcacttcagtcatacatatactaaagttgaaatgatacagagaagattagcatggtccctgtgtgaagttaacacacaaatttgtgaagcagtccatgtttaaaaaaaaaagtttaaaaaaaaaaggttaaagaactattaacttccagccaggcacggtggctcacgcctgtaatcccagcactttggaaggccgaggcgggcggatcatgaggtcaggagttcaagaccagcctgaccaacatggtgaaaccccatctctactaaaaatacaaaaaaaaaaattagccgagtgtggtggcacatgcctgtaatcacagctacccaggaggctgaggcaggacaattgcttgaacctgggaggcggaggttgcagtgagccgagattgcgccactgcactctagcctgggcgacagagtgagactccatctcaaaaaaaaaataaataactattaacttccaaaaaatgttcaagaatgtgaatttagtcactatttttgtacagaaatataaatttagaaatgtaattttctgaaaaaacattatgtagcaatgtatttcatgttgcttttatttaaaattccctttgcaacttgaagttttttagtttttttttttcttttaattgctcccttttacctgatgacattcaaattgggaagagaggttggtagaaaaactaaaactctacaatctatttcttaaaaataatgtttttcttttctttctttcctttcttttctttcttttctttacttttttttttcttttcttttctttttttttttttgacagggtctggctctatagtccaggttgagtacagtggtgtgatcacggctcactgcaaccttaacctctaggctcaagtgacccacctcagcctcttgagtagctgggaccacagacacaccaccatggccagatagttttctgtattttttctttgtagagacagggtttcaccatgttgcccaggctggtctcaaactcctgagctcatgtgatctgcctgcctcggcctcccaaagtgctgggattacaggcatgagccaccacatgtggcccattttttcttcataagtgagtttgtagtttttactttgttctaattttttgaggctatgttcaggaagccatacagcttgaataagtaaccatctcaggagaaaaaaaagagaggaggccactgagatcggatatataagaacaggattttattagtggcttggggagggctggttgcagggccagctcatttattttttggtttggtttggtggtttttttttgttttgttttttttggttttgttttgagacagagtcttgtgctgttgcccaggctggagtgcagtgacacaatttttcttctgcctcaccctcccgagtagctggaattacaggcatgcaccaccacgcctggctaatttttgtatttttagtagagacagggttttaccatgttggccaggctggcctcgaactcctgaacttaagtgatccactcacctaagcctcccagagtgctgggattacaggcataagccaccgcgcccggctgtttttgtccaagcctggtttctgagagacagtttccttggtcaggagagtctgtaaatgaatttattagaataggtttcttggagcagttaccggcctcaccgtaagcaacagcttgaggaagcagatacctggggcagatttcccagtgagtcactcttcaacttttcaaggacctttgttcgagagatctttatctccaagctacagcttaccctaccctaggacaatttagtggcccatctcaagctacctggtttgataaaagaacattgatcctgggagttagaactctagctctaatactaaccagctggtgactttggaaaatgattggagctttatgcatctcagtttcctcactgtaaaaaaggggatttggttacttgatttccaagctactttcttaatgaaaaaaatctgccatttgtatctgaaactgaaggcatcttccttctcagcaaactgttcccctttctatgtataccatttatttgtcatgcaacgatccttctagtctctgaagctaaaaatctgtgtttatttttgttatatgtttcctttaactcttgcagccaactgtcttccaatccagcagttcttccttcacagttcatgtggtagtagaatgcatatgactgaagagaatgggttttggagtctgaaagtctgaaaatggaactcatatctgagagagactgtgtgggtggggagagataatatacctttcttttttttttttttttttttgagacagagtctcgctctgtcgcccaggctggagtgcaatggcatgatctcgactcactgcaacctctgcttcccgggttcaagcagttgtcctgcctcagcctcccaagtagctgggattacaggcgcctgccaccatgcctggctaattttttgtatgtttagtaaagacaggattttgctacattggccagactgggtccggaactcctgacctcaggtgatccgcctgcctcagcctcccaaagtgctgggattacaggcgtgagccaccatgctggccccaataccacacctttaatgcaggccaatgaaagccagttactacaatggagggtattccaagtgagcccaggataacttttaagtttccctgaaagcaggaatgattatctctgatattcaccactctgggaagatactcaccactattctcttactgaaaaataatttgtatgggttttcagctaggtggttcagggatttttctagctggttttctacattggctaaaagtggcggttttaatcattcttcattaattgtagttgaaagaaaatggactttggaatcaaacagaatatgcgtttgaatcccagctctgctactttatagctaagtgatctttgtaaagttaatatgtctgaatctcaatttcgttaccataaatataagacaataaaaccaatcctgtagaatgattgtgaggattgagatatatgcaaagcataaagttagtgtcttaaaatcttccaagagtcggatttctaactttagctttgaatttgtagtttcctattgtatatcatttggatttctcttgctgacatgtatgtctcaacatgtgtaaatcaacactcatcattttccctcttctttctatatttactgtctctgttaatggaatcaacagccttccatcattcgggtttgatgatgccagctttgattctcttttaccctaagttcattttattctaagaactgtcaatttctctcttcccacttttccatttccacctaccctaattaatttacgaatttaaaccttgattacctctcacttagtttcaggatcttcttgactagtaatttagactccagtctttttccctcttagcaagttgcacactactgctgaataatattttaaaatatgatgttagtcatgttacatgctttttcagaaactttctgtgttccaccagagagactgtggttaatccactacagagatcttatcttacaggtgtggatattgaggatcagaaactttttttgttataaaaaccatgcatgtgctaagtaaatagcacataagattagacctaatctctgatcactcatgggttacttcttcccactattgaaatatggcccaaactccttagcatggttttcttcccagtcaggccccattatgtctttttttttttttttttttttttgagacagtttcgctcttgtcacccaggctggagtacagtggtgcaatctcggctcactgcaacctccgcctcccaggttcgagagagtctcttgcctcagccttccgagcagctgggattacaggcgcgtgccaccacgcccagctaattttttgtatttttagtagagatggggtttggccatcttgggcaggctggtctcaaactcctgacctcaggtgatccgcctgcctcagcctcccaaagtgctgggattataggcgtgagccaccacacctggccaagtcttgtctatcttcaacttctcttgcacctagagtttaactcactccccaaaggtgctaatgctattctcctccttcctcctcctgccttcactttgatgaaattctgcccgttctttaagtcccaagtcatctgatatcttttcctttccctctcacaaagccagaaaatcaggtcttgtattcctacaccacgcatagcctctaaccacattctgtcttgtactataaatatttgtgtgtatgtcagcaagcacagtagattatgtacaccattcaggcagggacatctccctacatctcataagaagtagttattcaatagcctggtaccagagtctatcaaaaatcatgtattgattctcacgtttatctgtttcataggtactaatcacattgctaagaaataacattatgcttctgtgaagacaagtgtggtcagggtgagagtcatctcattccctgagtgtaagaactctaagaactgtgtgcctctcctagctgtataccaaaatagatgttctgacttttcttaactttctggctgggagtaatcaaaaccacggacttagacttgggagttaaccttttttttctttatcgtgctcggtatctcaaataataaatccttttccttttttagaaacatacctttttttttttttttttttgaggtggagtctcattcactctgtcacccaggctggagtgcagtggcatgatctcagctcactgcatcctctgcctccagggttcaagtgattctcctgcctcagcctctcaagtagctgggattacaggggtgtaccaccacacctggctaatttttgtatttttagtagagtctgggtttcaccatgttggtcaggctggtcttggacacctgacctcaagtgatctgcctgcctcggcctcccaaagtgctgggattgcaggtgtgagccaccgtgcctggcctgcaaatgtatcttgtatatattttttcccctttgatccagagttgatctttatggaagaactgacagtatttatacccacaactatattggtagtatatttctaccaaataatatcttaaagcattcattagcatttccttaacttgccttacagagtttaaaaaaaactatgatagttttatatagttaagtttagctgaaatgtttgttgcttctgtgtctttttcatcttagagaaggggctggcattgtttggtgagtctgccagtttaataccagatagacaaataggtatcatgtattatttggtacattccagtttattgcaaagtacatgtatagaattaagattattttgttcaggaagaaaagaaaacattaaaaacactaaacagtaacatttattgcttacttattctgtatcagggtcttttcttctttatcttatttatttctcataagaatactgtgaagtaaatgctattattatggatgagaaatccaagttttagggaaacttttcattaagtgatgaggccaacattcccacttagacttatctgtctctaacccagagctccttaccattaaagggcatactatgccttccaacatgaggattaaaacatattaacaaaactagtattattttccgacaaggatttcattggaagaacaaatattacatgtagaacagtagtagtgtggtcttttagaattgtccattgcttattctgcatcacgggactttttttttttttttttttttttttgagaacatcttggtctgtcacccaggctggagtccagtggcgcaattcatagctcattgtagcctccaactcctgggcctagtagctaggactataggtgtgtgccaccacgcccagctaatttttaattttttgtagagaagagggggtcttgctatgttacccaggctggtctcaaactcctggcctcaagctatcctcccaaagtgctgggattacaggtatgaaccaccatgtctgacccaggacctttttttttttttttttttttttgaaacggagtttcgtccttgttgcctgggctggagtgcaatggtgtgatctcggttccctgcaacctctgcctcaagcaattttcctgcctcagcctcccaagtcgctgggattataggcatgcgctaccactcctggctaattttgtgttttcagtagagacaggatttcaccatgttggtcaggctggtcctaaactcctgacctcagacctcaagtgatccacccacctcggcctcccaaagtgttgagattacaggcatgagccaccatgcccagcctgacccaggacttttaatgtgaaatggcagcttgagttgctggatttaaatactctctgtgttctacagttgtcaaggttattgaaagcagtacctgatgaaccatacattcaaccagatcagttatgctcttcggttgccaagagctgcaagtagtactttatttttcttttacttctggtaagctgtgaattagcagtactttattattatttttttttagttttcaagactcctggatcagaaacaaagtggtactttatatttttcactcttcaaataaggaaactgttgactcatttctaatctctcgtcttctggacaaaggttggaactcctttcctttggtaattagtggggcaaaataaccaaacgatccagattaatgggtagggactaggtgatatcaagggtatggctttatgtattctttggctgaaagggatgttggaaaatagggtttgtctcctgaacttaaagtacattatacttctccttgataaaggctttaaaatgagaattataacaagagtcaatgataataattatacttaaaatgctcttaatactactgtaatatacccagtattttaaatatattatctccttaaatctatatcaaaacctcctaaagatagatattatccttattttttagctgaagaaagtgaaatggaaaatattacataatatgttcaaggtaacaaagttaggatttccccgaagtctgtctcaccttaaagccctgctcttcctattacaccacgctgcgcccccagctctctccctggcactgagtggccagtgctgcagagcttggggagagagggcagccaaaagaaacttgaatgtaggtagaaactaatttggacctggctctactgagatgctgactgtacctcccctgggatgtaattcagaagagggaaacatttcactccaaatgtgactttggaacagacttcagttcagggaaaggccaattgatgtttgcacagtggggtcagtcataaaatggaactggaagggaccttaaaggtcatctggtgtagcctccttttataagaaaccacaacccaaagatattggatcatttgaccaaggttacacagtttgggggagaacagtggaggagtgtggtctgcaagtttagggctctaccacaccactgccaatccttggatgttggagaatcctcttctgtgtctaatgttctgactttctttattgcataggtatttcagtgtctgtagacaagatggaatcatctccatttaatagacggcaatggacctcactatcattgagggtaacagccaaagaactttctcttgtcaacaagaacaagtcatcggctattgtggaaatattctccaagtaagtgctgatcctggtccaaaaggaccatctgtctggagcacacattgccacctgtcagggaaattggtgaaggaagtacataatgtaaaataattttattgggcgcctcgtggattttaaacactatatgaggtactgtggagaaggaggaggagggtaataatcagaagatacattctattctttgaatttttgtttagtttgtggaagaaacagttatagacacaaaaattattttaaaaaagataattatgaaataattataaagcaaaatatcagcaagtctaaaatgaataggagtgaggattaggtacagaataagagacagagcatcacagacaggagctcatcaggaaggctttctggttgagatgagtgttgaggcgagttttgatttggttgaatggtgcgttaagcactctctatacctgcactttccaatgtggtagccactatataggtggctatttcagtttaagttaattaaaattaaataacatttaaaatttagttttaaatgtttaccagctgcatttatcacttttcaagtgctcagtaactacttgttggtgactgtcgtattgaacagcacagaaacatttcatcattgcacgaagttctgctgaaaagtgtaacctacacaggcacactacagcccactggctgctgattagtaaataaaacttcattagaacacatccggtcaggcgcggtggctcatgcctgtgatcccagcactttgggaggccgaggtgggtggatcacttgaggtcaggagttcaagatcagcctggccaacatggtgaaaccctgtctctactaaaaatacaaatattagtcgagcatggtggcacatgcctgtactgtagtcccagctgctcaggaggctgaggcaggagaattgcttgaacccaggaggcggaggttgcagtaagctgaaatcgtgccactgcactacagcctgggcaacagagcgagactctgtcttaaataataataataataataataataataataataattccagcatttattttgcttttgaagctccagtttgggcaggatctctgctctacttagcatcagccagggtggcccaaaggctgggagctgtaatcatcaaaaggctggctcactcacaagtcaggcggttgatgctgtcatctgggatctcagctggggccatggtaggaacacctacacatggccattccatgtggctgtttggcttggtggctcagttcccagggcaatcatccagagacagagggaaggagggaagaaaagggggagttcaaagttgtgttgccttttatgacctagcctcggaagtcatacagtatcacttttaccacattcacttcattagaagtgagtcactaaagctgactcatttcggggaagggcaatttgactccaccttctctgataggaggaatgtcagaattttttggacattttaaatttttttaattaaaaaaaaaatgttgagacagggtttcactctgtcacccaggctggagtgcagtggtgtgaccacacagctcagtgcagcctcaaactcctgggctcaagcaatcctcccacctcagccttctgagtagctgggactataggcacacaccactgtgcctggcctggacatgttttaaaatcatcctatattctgattcagtatgtgtggatagagtccaggaaattatgtttttaacaagtatcccaggtaatttttaccttcagggaagtttaagaagcactggtagtggaagggatggacttgtggagtcaaagcagtgagcttgaagtggaatgagtcgagtctaagataggagattgaagcaaaggattatggaagctgaacacgaataaagggaataggaaagcaagcagtctgccatggaaaaatacagaagggagaaggaactggtgtaattcatttagggccagatggaagacctcggatgctctgctaaggttaggatttagtaagaaaaccagggaacgcaattggttttcatgtggggagagtgacatgatcagaccggtattttagaaaaagccttctggcaacagtgtaaagctatattagaaaggtgagagattggtaacatggagacaatttatgaggctctcttgggaacccaagtgaaagctgttgggggtcaagggggaacaggaatagagagaaagggaaggatatcagacggtgttgagatgtgattatgggacttggaaactccctgtcctgcacagaaacttctccacgttcttacccttttcaccctccttagccccacctgtctttaactaaacttggctttcccttgacatgcatgacatgcattctgtgtttgagcagtggctgcctgctctttctttttttttttttttttttgagatggagtctcactctgtcacccagactggagtgcaatagtgcaatctcagctcactgcaacctccgcctcctgggttcaagcgattctcctgcctcagcctcccgagtagctgggattacaggcacatgtcaccatgcccggctaatttttgtatttttagtagagatgggatttcatcatattggtcaggctggtcttgaactcctgacctcatgatctgcccacctcgacctcccaaagtgctgggattacaggcgtgagccaccacgcccggcctggctgcctgctccttctgcacatgcttccctgaaatattttgggggccagggttgctactcttctatatctccaataatgtttcccattcattgtttctcatgcctgcttctgaagttctagacatgtgctttcaggctcacatctaactataatgcactgttatcctccccttcattgcagtggcgtgccagcctccaggggacgctggcttctagcatcattttttttttttagtgtttctcactgggggtgctgtagcatttggggtaaggcagatcttccccatgcagggtattcatcatcatgccctcctctaaatgaacccatgacattgtgacaaccaaaaaagaaaaaaaaaagtgataggggagaaaacccaacaagattctaacacatgtgtctaaatgtcccccagggccattggcaccaatggtgtcctcattaaaggatcactgggtccacatcagtgacctgtctgatactttgggctcataatttcttttctttttctctctctctcttttttttttttttttgagacagggtcatactctgtcgcccaggctagagtgcagtggtgcaattatggttcactgcagactcgacctcccaggctcaagcagtcctcctgcctcagcctcccaagtagctgggaccacaggcatgcaccaccatgcccgtctaattttttatttttgtaaagacagcgtctcactatgttgcccaggctggtcttgaactcctggattcaagcgatcctcctgcctcagcctcccaaagtgctgggattacaggtgtgaaccactgtgcccaacctggactcataatttcttgatcttccctgtttctgcaacctgcatgttgtctcccatgcctctgcctcccgtctcaacctatcactcagaatccttctctgaaatgatgcatttggagaacctactgtttgattggagccttctgtttttccacttgtttaactcttattcccagtgaccctgtgttttgacctcaccaggacacccagccctggatgtcagtccccttcctggcctcactttcttccttgcccagctcagtcacttcagtgaggctctcacctcttccccagtgcctttctcaccactctattctgtcattgtccagcccagccagttctcattaggatttgggtcctatagtagcactaaggagagttaagaggttggaaaaggcttcatctttagggccttcttaatcttgcagagagaaagtgcagagggatctcacaggtccttctcatggtatactgggttcactgtcttttctccatgaaggctgaaaggattgcaaaactgtcaatcctgaacccattaattacaatcagtgtgccaggcaccatgctagacccttgatagaaacacatactattttggctgggcacgctggctcatgcctgtaatctcagcactttgggaggccatggcaggtggatcatttgaggtcaggagttcaagacaagcctgcccaacatggtgaaaccccatctctactaaaaatacaaaaaaatggctgggcgcaatggctcacacctgtaatcccagtactttgggaggctgaggcgggcagatcacgaggtcaggagttcaagaccagcctggccaacgtggtgaaaccctatctctactaaaaaatacaaaaattagctgggcatcgtggcccatgcctgtaatcccagctactcgggaggctgaggcaggagaattgcttaactgggacctggggggcggaggttgcagtgagccgagatcacgccactgcactccagcctgggctacagagcgagactctgtctcaaaaaataataataatacaaaaaaatacaaaaatttagctgggcggtggtggtgcgtgcctgtaatcccagctacttgggaggctgaggtggaagaatcactggagcctgggaggcggaggttgtggtgagccaagatcatgccactgcactccagcctgggcaacagagtgagactccgtctcagaaaaaaaaaaagaaatatataaaatatatactattttgaatcctaacaaaaactatatgaggaaggggctttacccctcttttatagttgagaaaactgaggtaaaggaagtaacctgctgaagttaatatttgagtttgttcctgtcacatatttttcttctgatgtgcttaacacatggaactggtttggaaagatgaatagagttatttggtaggcttggagaatgctgaagacattccagaggaaggggagcaacaggaggtaaaggcatagaagtaggacaggtggtggtatatactgaaaggagtgaaaaccagggaatcagcctggatttctgttctaggttttatactcagtggaaacacgttgctaatattacttaaggtttgtaaggttcactcactgcagcttcccaaagaagactgcaggactattttccgagatcagttgagatcaggcgcgttgagggtggtatggctgtagactacaggactattttccacaaagcatatactaatgtctgtttccaacacctagtggctttatatttatggggtttgcaaatagtgagtcctatacaagcctagctaaaaacagtaggaaaacttaggaggtctctgatcagagattaatatgaaattgttgtttggaggaagcttaatctagctgatgtttgtagataagtcagctttactttctaattgttaacagtgcattttgtgtttatatgtatagaagagtactttttctagcatcagagcttgtgtcccatggtcctttatagctgcaggcttatttctctgactaagcctctataacagtcgttaaatttgaggtaagaagttcctattgatacatccatttgaatagctagctttggtttcactcaccactgacttcagcataatatgatccttcatttgataacagttgactctttgggtggaatttgtttgactcatacatttttggaattaaagagaatctagcctggtagtttttaaactatcttaattgaagtcttcagaggaatctcagggccagttctccaacaactggaacaccctaagggctaaacccaagcccagatcccaggcccagatcccagtcccagatcccaggcccagctctttagattttccattccagcaatcctgctttgatcccttgtaaaggttaggttctgcgtaagacagcatttgaagagagggttctgcagctagcagagcttgaaaccactggtctggctagcatttgccctattcctttgacagattaggagcttgaggattagcaattatgactgaaggtcatacaccaagatggtagaattgatgatcacagcatgaagatccctaacctaaccccctgccagcatgcctctaccttatcacagcttctcctgtttttgttataactttacccattcctagttccaggaaacaggaggaggccgggtagagaggatcacttgagtccagaagctcaaggctgcagtgaactatgattgcaccactgccttccagcctgggtgacagagtgagaacctatcttaaaaaaaaaaaacaaagagcgttcatatttagttttctgtgactattcttccttcaataagaaaaaaattgaccttcaagtcagcctggttaacttcctcttctttcgcttctctgtaacattttagtggtgaaatttttccagaagaaaatacattgcttaaaccttgggagtttctgttttccctttttggctcagcattccctttgctctatttgagggcatacaagcaagagtcatggctcaggaactctgttttctggccctagaaaaatttgagacactgttattactccccagataattttagcgtcctccatcagctgcctgccccacagctgagcattagtgagctgttgcaagattaaattccttatgtaaagaaaaggaggctggaccgcaaaaaaaaaaaaaaaaaaaaaaaaaaaaaaaaaaaaaaatctgggaaggaaagaggaacaaaattttaattacagaaattttattgtaaatgttttattttctcaaatttggatcttcaaaatggtgcccccattttgtgtccttcacattttgtgtcagaagaatgctagttgctgtaagggcctctgagaaaagtctgaggcctgaacacggaattcagaagtattgagcctcagtcttgtggcaatctaagagtacaaaatataaaagtaccagggatctaacttggaagaaagaggtggtgtagagcctttctccctgttatctactatttagcaggaacttcattacaaataaaaggtggagatatttgagtaggggtttgagaacaggattaaagacagcctttggtgtatacacctggtcttacagatgcctccatgctaaaaggacaaggctaaagatgggaactattttgatttttttttaatctatgtttctattagacactaaagggaagggaacctctgagcttatttactcaactaaccacaatgtaaataccttgccttggagaacagttggctaaatataaacctgtctgccaattggttctagttttcatatattgtattattgctgtaatatactgtagatgattatccaaggggtgtggaaacgcaagttcaaggccagttctaagttcctttttataatagctacaatccactgtatccctgaattctcacttttagggaatctcttagacagatatattagtacaagtgggaaaaatatacgtaaaaggacattccccaaagcgttatttgcaatggtgaaaaactggaaacaatccaaatgcccattaaaggaatatgggtgaattaattataatgagagaggattgtcaagattaccaaacacttccatgttgctaaatcaaagggatgtttcttggcctttatcttacatgaactctcaccactttttccctcccacatttttgcttctcttggcttctctggcagtctcatcattttcttcctccctctctctctcttccttgtcagtctctcttatcatttgttctgactgctgaaatgttcgagtctccaggactgagttccaggcatcttctcacactacacactgcttgcagatgtcatctactcctgtggctttaataccatccatgggcacgcaagttctaaatgcatacaactagctcagagctttcttctgagctccggacacatgcatctcatcactgctaccaccaaatggatgttttagttaacatggctagcattgaactcttgatcttccccgtttccaaatttgctcttctttcacaattcctcgtcccaggaagcattacttccattgactcagctgccagaaacctaggaatcattctctcttccccatctgattactaccctactgattctttctcgaaatatatctcaaatctattcacttttctttatctctagtgccattatctctgcagcccagccagcattatctctcattaatgccacctccattctcagcccctccagtccattctccacactccagagcactctttaaaaacacgaattgaatcagtgaccatcctaccattaaattcaaagtccttagcattacctgcatggcccatccctgcctcccgcctcattgcctgccctttcccctctcagtgagcttctgcaacactagagttctttgtgcaccctatatacatgagacactttcttgccttgaggcctttatgcatggtgtttttctgttcctggtatgctttcctcccttccttttgtctggctaacttcatctggtcaaacttcacatctcagcctacaggtcattttctcagtgaggcgctccttttaaaaattttttattttatgttatgttatgttatgttatgttatgttatgttatgttatgttatgttatgttatgttattttgagatagagtctcactctgttgcccaggctggagtgcagtggcgccatcacggcacactgcatcctcaaattcctgggctcaggtgatcctcccacctcagcttcctgagtaactgggactacaggcgcatgccaccaagccctgctagttattttttttttaagagatggggtctcgccatgttgcctaggcttttctcaaactcccgggctcaagtgattggcctgccttggcctcccaaagtgctgggatcacaggcttgagccatcgtactcatccatttgtttttagctgacaaagaataattttacatatgtatggggtccaatgtgatggttttttgtttgttttttgagacagagtctcgctttatcacccaggctggagtgtggtggtgctatcttggctcactgcaacttcctcttcccaggttcaagcgatcctcccacctcagtctccgagtagctgaaactacaggtgtgcaccaacgtgcctggtggctaatttttgtctttttaatagagacgaggtttctccatgttgcccaggccagtcttaactcctggcctcaagtgatctactcgactcagcctcccaaagtgctgggattacaggcatgaactaccacatccagccaatgtgatgttttaatacatgaatacattgtagaattatcaaatcaggctaattaatataagtgaggctttccttgatttcctcttcctttctcaattgtgttcctttgttatttaataataccctgttcttttttttcaaaggacttaccactctgtgtgtgtgtatgtgtatgtatatttgtgtgcttctgtttttagtgtctaaattgtaagcatcggagagcagatattatgtctgttttggttatttctttcgttactttttctctagtgcttggaacatagtagacagcaataagtatttctcgaatgaaaatgtcagcttctctgaatttctctctgaaatggagaaagggagaagcagaatagtatgtatcacattatctcatttttgttacttaaaactcaaatatgagttgcaaatattttctcccactccatgggaacttttcactttgttgataatgttctttttttttttcttcatgattttttttttcttcgtgagacagagcctcgctctgtcgcccaggctggagtgcagtggtgcaatctcagctcactgcaacctccacctaccaggttcaagcgattctcctgcctcagcctcctcaatagctgggattacaggtacccaccaccacacccagctaatttttatatttttagtagagacggggttttaccatgttggccagtcttgactgacctcaagtgatccacctgcctcggcctgccaaagtgctgggattacagtcatgagccactgcacccggcttgttgatagtgttctttgatgcgcaaaagttttttttgtctttttttgtttgttttgttttgttttttttgagacagagtcttgctttgtcgccagggctggagtgcagtggcgcaatctcggctcactgcaatctccacctcctgggttcaaatgattcaccagcctcagcctcccaagtagcggggattataggtgcccaccaccacacctggctaatttttgtatttttagtagagacaaggtttcgtcatgttggccaggctggtcttgaactcctgacctcacatgatccgcccaccttggcctcccaaagtgctgagattacaggtgtgagccaccatgccaagcctcagaaaagtttttaattttactgaagtctagtttgttttttcttttgtgcctgtgcttttggtgttgtattccaataaggcattaccaaatcttgtaatgatgagatgatcaaaagataataaaaaattaaaataagatgaaaaaataagaaaaacaagaataagaaagaaaaacgacaaaaaataaatttcaaaaaatcattgccaaatccagtgtcatgagacttttcccatatgtttcaaccaagagttttatagtttcagctcttatagttaggtctttgatccatttgacttaatttttgtatatggtagtccaatttcatttttttgcatgtggctatccagttttcctagcaccatttgttgaaaagattttcctttccccactggatggtcttggcacccttgtcaaaaaattatctgaccatacatgtaagggtttatttctgggctgtgtgttctgttccattggtctgtatatctgtctttatgccagtatcatactgttttgttttaactgtggtaaaatacacagtatataacataaaatttaccattttaaccactttttttcttttttttttgagaccgagtctcactctgttgcccaggctggagtgcggtggtgtgatctcagcttactgcaacctccacctcccagattcaaaggattctcgtgcctcagccgctcgagttgctgggactacaggcatgagccaccatgcccagctaatctttatatttttagtagagatggggtttcaccatgttggccaggctggccttaaactcctgacctcaggagatccgcccgccttggcctcccaaagtgctgggattacaggcgtgagccactgcacctggccaaccacttttaagaacacagttcagtggcattaagtacattcatattattgtacaatcactaccaccttccctttgtccttttgttgctgcacagtatttcattatacatatacattataatttaccactcctctgctaacggacattcaggttgttctcagtcttttgctgttatatttaatgctatgataaataatccaatattaaaatctttttttagtgtatctataggacaaattctgggagcagaaagaattggtaaattataacatttgtgcttttataattttggcagatattaaagaaggcatagacaaaatgccttctataaaggttttaccaatttaccttcccaccagcaatgtaagacagaacctgtttccccataccctcaccaatgtcccatattagccttttttgtttgtttatttgttttaaacagaagttcggtggtacaatgacagcccacggcagcctcgaactcctgacctcaagcaatcctatcgcctccacttcccaaagcgctgggattactgggattacaagcatgagctacccaacccaactgcatattagcttattagctgtgtgcgtgtgcgtgtgtgtgtgtgtgtgtgtggttttaaggagcagagagtctttaataggcaagaaagacggaagaagcagcttccccatacagagacagagggagaaggactccaagccgagaaagggaaccccctgcatattagctttttaagaaaatcttttccggccgggtgcggtggctcacgcctgtaatcccagcactttgggaggctgaggcaggcggacacctgaggtcaggagttggagaccagtctggccaacatggtgaaacctcatctctactaaaaatacaaaaagcttatccgggtgtggtggtgcgtgcctgtaatcccagctacttgggaggctgaggcaggagaatcacttgaacctgggaggcagacgttgcagtgagccgagatcacgccactgcactccagcctgggcgacagagtgagactccatgtcaaaaaaaaaaaaaaagaaaaaaaaatattttcctacttaataggtaaaatgttgttagcattgtttgaatttgcattttgaggttgaacatcttttctgtttaagagtcatgagatgttctttttgtgaactgtatgtttttgttttttttgagatggagtctggctctgtcacccaggccagagtgcagtggtgcaatctcggctcactgcaacctccacctcccgggttcaggcgattctcgtgcctcagtctctctagtagctggaatttcaggtgcctaccaccatgcctggctaatttttgtatgtttagtagagacagggttttgccaggttggcggggctggtttccaactcctgacctcaggtgatccacccacctccatctcccgaagtgctgggatcacaggcatgagacaccgcacccagccgtgaacagtatgtttatatctgcctttttatttattcagttgtcattttcctgcttattagtagttatttatattctagggaaattaattttttgtctgtaatataagttgcaaatatattttcagcttgtcaattgaatcacagcagttctaatcccactttcttcctagttatggtcaacgaagtgccagaaatttttggtagcccttttaccctaccccattagagagttctgctcaattgcagagcagtactacatggcgactgagatgcttgttaatatctgattattaaaattagacagtgataggattgggggctgggcacggtggcttacacctgtaatcccagcactttgggaggccaaggctggtggatcacttgaggtcaggagttcgagaccagcgtggcaaacttggtgaaacccgtctctagtaaaaaaacaaaaattagccgggcatagcggtgcacacctgtaatcccagctactcaggagaatcacttgaacccgggagacagaggttgcagtgagccgagattacaccactatactccagcctaggagactgagcaggactccttctcaaaaaaaaaaaaaaaaaaaaaaagtgataggattggaagaccctttatgtaatactctttcttggctgggcatggtggctcatgcctgtaatttcaacactttgaaaggctgagacaggaggatcacttgagctcaggagtttgagaccagcttgggcaacatagcgtgaccctatactaaaaaaaatttttttaaattagtcgggtgtgatggtagacgtctttagacccagcttcttgcaaggctgaggtaggagaattgcttgagtcctggaggtcaaggcaagctacagggtcttactctgtagctcaggctagagtacagtggcatgatcgtagctcgctgcagcctcaacctccctggctcaaggaatcctcctatctcagcctccccggtagctgggactgcaggcgtgcaccacacctggctaatttttgtatttttcgtagagacagggttttactgtgttgcgcagtctggtctcgaactcctgggttcaagcgatccgcccagctcggcctcccaaagtgctgggattacaggtgtgagccactgcaccaggcctgaggctgctttttttcttcttcttttacctcctactccaaatgcctcatgaattctgaaattctacctttaggcagaggacagtgcccttttctaggggtggggctgagttctgctaaggcaggcccaaggagaggcacataatggtgattctccacgtggtggtgctgacttcaatgcatgactcagaggtctggaggaagccaggttaaggttgttctagggccaggcatggtggctcatgcctgtaatctcagcagtttgagagaccaaagcaggcgtatctcttgaggccaggagttcgagacaagcctggccaacatggtgaaaccctgtctctactaaaaatgcaaaaattagccaggtgtggtggggcatgcctgtaatcccagctacttgggaggccgagggatgagaatcacttgaacccaggaagcggaggttgcagctagctgagatcgtgccactgcactccagcctgggcaacagagcaagactctgtctcaaaaaaaaaaaaaaaggttgttctgggtggtctggagatttgtgcagcttgtacctgcacaaatctccggaccacttagtctttaaatggagaaaacctgttcctccttgaaaagaactttaatttttttctcagaggtcttccaatccaagtaataaaaatgacaaaatgataaaagtaataacaaataattatttatgaaatctaagatgtcatcaactatagctgtgccactatttttgcatctctaagaaaaaatgctgattaaactaatcactgcttattacaaacttttctcacatatcactcttgtgcatatgtaaaataatttttccttaaatgccaaacatagtatgatcttttaaaagacatttttaagtggcatttaaaacatataataatagctgtgtgctgtggctcaagcctttaatcccagcactttggaaggctgaggcaggtggatcacatgaggtcaagagttcaacaccagcctggccaacatggtgaaaccctgtctttagtaaaaaatacaaaaattagccgggcatggtggcacatgcctgtaatcttagctacttgagaggctggggtaggagaatgcttgaacccgggaggcggagattgcagtgagccgagattgtgccattgcactccagcctgggcaacaagagcgaaactctgtctcaaacaaaacaaaaccatgtagtaccatcaaatacttttaactgagttaaaatgacaatatcaataacttacactaaattcaacatgtacaggcaatgtgactatctctcaaccatttggctgagaacaattgtaagatatcaggcataaatatgggaggggaaatgtatatgttggaattaatgcattgctgtatggacttaactaatttcaaaatgtttttacacatgattacatttaatcttcctggcaatcctgaaagtagattgtaacttctttctagataaggaaactgaggcttagagagattaagtcacttgccagagatcacagttaataagcagcaaaactggggcttaaagcctagactttctgctctatccaattgtttcagcatttgaccttatccacggggatcttgttgttatatcagagcagatgactggaatagctgcaggaagtgaggtctgctctgatttacagcttcttctgatagagttgattaaaagcaactgctggcagaaataggtatgcagactgtttttttgggtttgtttgttttgaatctcgctccgtcacctaggctagagtgcagtggcgtgatctcagctcactgcaacctccgcctcctgggttgaggcgattctcgtccctcagccccccgagtagctgggattataggtgtgcgccactatgcctggctgatttttgtatttttagtagaggtggggtttcaccatgctggccaggctggtcttgaactcctgacctcaggcgatccacccacctcggcctctgaagtgctgggattacaggcatgagccacttcacccagcccagaactggttttcttaaagattaaaagtggctggggggctgggcctggtggctcatgcctgtaatcccagcatttggggaggctgaggccagcagatcacttaaactcaggagtttgagactggcctggtcaacatggtgaaaccctgtctctacgaaaaatacaaaattagccaggtgtggtggtgtgcatctgtggtcccagctactcaggaggatgaggtggtgggatcacttgagccctggaggcggaggttgcagtgtgacaagatcacgctactgaacttcagcctgggtaacagagggaaatcccatctcaaaaaaaaaaaaaagaaaaaagaaagtagccgggctggtggctcatgcctgtaatctcaatactttaggaggctgaagcatgaggatcactttagctcaggagtttgagaccagcctaggcaacatggcaagaccccatctctacaaaaataaaaaaattaagccaggtgtggtggtgtgcacttacatagtcccagccactcaggaggctgagacaggaggtttgcttgagcccgggaggtcaaggctgcagtgaaccatgatgaaccatggttgtaccactggattccagcctgagcaacagagtgagaccctatctcaaaaaaaaaaaaaaaaaaaaaaaagctgggcactcactttgggaggccgaggcaggtggatcacttgaggtcaggagttcgagaccagcctggccaacatggtaaaaccccatctctactaaaactacaaaaattagctgggcatggtggtgggtgcctgtaatcccagctgttctggaggctgagacaggagaatcactcgaacccgggaggtagaagttgcagtgagccgagatcgcaccactgcactgcagcctgggcaataagcgtgagacttcatctcaaaaaaagataaaaaattgaaagagtaaaaatataagtttaatttgagacattctttccttcccttctctgaaggtaccagaaagcagctgaagaaacaaacatggagaagaagagaagtgtaagtattcagaaattccagggcatgtggcacttcttgagcagaattgtgtggccaagccacctgcagcctctgtggggcttgggttctatgtcagctgagtggacatttgtgccagctggtgtgatctctgagccatttgctcaggacaacttggcttagtgcagggaatcttattttttcactgcttttctccttttgaaccactttttctttcctgtgttgagtgaaggacaagaggccaaatgcttgcctgaggttagtaaaatggcttctactcaaatgagaacacagggtttcctaggtggtcttccttttttccaaatcagacaatcagaacttctacatctgtgcatttaaatggtagtagctgtgcagctgttgtcatcttctgggttttttgtttaaagcaaacttcttgacccaatctagttagcaagtttcctagctgcaggatctaccaaagacaaaaacctccagaataaactctctgcttctacccgttctctagtctccgtgcttgctaacttccggtgaggctgaataatacatgtcttttgaaattttacttgatttaatcttgtgaggaaaaaaactcatatgtttggtcaataattccttaattcggatggcattacaaaaacatcctcctggcagttttcagtagctaacctatttaaattagtgcataatatgttcctgtaaatttgttctaaggctaaggtccttggcttcattttcctgtaattaaaaaatgggtctcctctggtgcattataagaaaaaactggccgggtgcggtggctcacgcctgtaatcccagcactttgggagaccgaggcgggcagatcacgaggtcaagagatcgagaccatcctggctaacacggtgaaaccccgtctgtactaaaaatacaaaaaaattagccgggcgtggtggcgggcgcctgtagtcccagctactcgggaggctgaggcaggagaatggcgtgaacctgggaggcggagcttgcagtgagccgagatcacgcaactgcactccagcttgactctgcagtcagccagagcgagactctgtctcaaaaaaaaagaaaaagaaaaaaagaaaaaactaccattactttactcaactgctggtttcttttcttccttccctcttgcctctgtttttcccccaacttgctcctttctttcttccttcccttcactgtcatccatttaacaagttttcactgagcacctactacatgccaagcacagactacatcccagccctcgtggaatttacattctagtgcaaaagacagacaataaagaaattgtgtcagtatggctgggcgcggtggctcacgcctataatcccagcactttgggaggccgaggcaggcagatcacctgaagttaggagttgggagaccaacctggccaagatggtgaaaccttgtctccactaaaaatacaaaaattagctgagtgtgttggcacatgcctgtagtcccagctactctggaggctgagccaggagaatcacttgaacccgggaggcagagattgcagtaagccgagatagcaccactgcactccagcctgggcgacagagtgagaccccgtctcaaaaaaaataaaaaaatttaaaaaagaaattgtgtcagtagtgattagtgctgtggaacagcatgaggcaggtaaggaggatagagtctagggtggtcaatgaaggcctgtggtgaggaaacgtttgagcagagatttgaagacatgagccagggagaagagtcaggcagaaggaaccgcttgtgcggatgtcctcaggcaagaacagtcttggtgtgtttgaggaatagaagagaaaggtcaaatggtgtcattgtaaagacctgggctttaactctgaatgcaaggaggcctttggagagggtttatatgcaaaggagtgatgtggtctgacttaaatttttttttctttttttattattatactttaagttctagggtacatgtgcacaacatgcaggtttgttacatatgtatacatgtgccatgttggtgtgctgcacccattaactcgtcatttacattaggtatatctcctaatgctatccctccccgctctccccaccccacaacaggcccccgtgtgtgtgatgttccccttcctgtgtccaagtgttctcattgttcaattcccacctgtgagtaagaacatgcggtgtttggttttttgtccttgcgatagtttgctgagaatgatggtttccagcttcatccatgtccctgcaaaggacatgaactcatccttttttatggctgaagagaaggctctaatcccagcactttaggaggccaaggcgggaggatcgcaggaggccgaggtgggaggattgcttgaggccaggagttcaagactagcctgggcaacctagtgagaccctgtatctctattttttaaatgtaaaaaaatagaaggaagagaatgtagaggaacaataatggcaggagcatggagaccaattaagagacaattataatgatttaggccaggtataatatggtttggactagagtagtagcagtataggtgttgagaagtggtcaggatgtatgttgaatgtagagagaaagaagaatcaagaatggcagcagtggctctgccacagtggcttgtgcctgtaatcccagaactttgggaggtcaaggcagaaggatcacttgaggtcaggagttcaagatcagcctgggcaatatagcagaccccatctctattacaaaaagtaaaaaataaaagaatagcaacaatgtttttggcccaaacacaattaaattaaaataccattaattgagatggggaagactacagtaaaagcagattagagagggagaaatagtagaagctcagttttgcacatgtaaactgtaacatgttttattaagacatccaaatggaaatgtcagtaggaacttggatactatataaaaatctagaattggaagagatccccgctgcggataaaatggacatgtgtcaaagtgtcagtggtacttaaagctatgaggtgcatgatataagctaggaagtgagtgtagacagagaagtggtctcatgacttagctcaggggcaccttggtgtttaaaggttggagatataaggagtaaccagcagaggaaacaagtgccagaagccgagtgaagaaagtgtttctagaaggggagttaacagaatcaaacacacaggtaagctgagaattgaccatcggatttggcaacatgaaggtcattggtcatcttgtgttgtttgggagtggtagaatagaggcctgaattggactaggttcaagacagtgggttaagagaagttgaccccacgagtatagacaatcatatgtggagcatctcttatgttccagctcctgaagacacaagaagaataagatgtattctctacctccaaagggactgtttagaatttggaaaatagaattacaacccaggtgtgataagtaccatatcaggcccggcgcggtggctcaagcctgtaatcccagcactttgggaggccgaggcgggcggatcacaaggtcaggagatcgagaccatcctggctaacacggtgaaaccccgtctctactaaaaatacaaaaattagccgggcacggtggcgggcgcctgtagtcctagctactcgggaggctgaggcaggagaatggcatgaacccaggaggcggagcttgcagtgagccaagaccgcgccactgcactccacactccagcctgggtgacagagcgagactccgtctcaaaaaaaaaaaaaagaaaaaaaaaattaccatatcaaataaatactcagagtgggctgggggagaatttaggagggatctgaactgtgctacatctagaaaggcttcccagaagaggcagtgcctgactcaaccctaaaggaccaagaggaattagctaagcagaggcgacagggagtggcagaatctttgtattctagatggaggaagcagcacacgcacagcatgaaggcataagagaacaggcctacttgacagatgaaaagatggttgtcgcattcaccaagatagacaattcaagaaaagaaacaggttagagagtgaggagtaaagggaagacttcgggcctggcacggtggctcacatctgtaatcccggctgaggcgggtggatcacctgaggtcaggagttcgagaccagcttagccaacatggtgaaaccccatctctactaaaaatacaaaaaattagccgggcttggtggctcacgcctgtaatcccagctactcgggagactgaggcaggagaattgcttgaacccaggaggcagaggctgtggtgagccaagattgcaccactgcactccagcctgggtgacagagcaagactccatctcaaaaaaaaaaaaaaaaaaagaaaagaaaaaagaaagtgaagacttcaaccttaatcaagaaggagtttaagatgcctctagcacttccaggtagaattggtagaaaaggagagatgtctatctagagataagttctataactctgtctatatagatacacagtatacatctatctatgtatttgttgatactataatctatatggtgggtgaaatcgggatgaataacatcatatacagagaatatgtaaagtaagcaaagcagaggacctaagacaaaaaccctgagggaccccaccatataagggagggacagaggaggagaaacctgtaaaaaaaaaaaaaaaagaaaaagaattactaaattatgaaactgagtagtggccagataaatgagaagaaatctttttttttttttttcatatggaatcttgctctttcgccaggctggagtgcagtggcatgatcgcagctcactgcaacctccgcctcccgggttcaagcgattctcctgcctcagcctcccgagtagctaggattacaggcgcacgccaccacgcccacctaatttttgtatttgtagtagagacagggtttcaccatgttggccaggatggtctcaatctcttgaccttgtgatccgcccgcctcggcctcccaaagtgccaggactacaggtgtgagccactgcgcccagtgaaatctttttttcattattgtttttttctacacccttcttgcatctcaaaatgggaagaaatctaagaaaaaggggtatcacagaaaagttggaagcaatttttaccagggagagtggtcagtaatgtcagatgctatagtgagataaaataaagcagaagcctccagtgcttttagcagttgaggtaagtggacgtgaataggtatttaaagaagagggtgggcatggtagctcacacctgtgatccccacactttgggaggccgaggtgggaggatcacttgagcctgggagtttgagcctgggcaacatagtgagaaccctctctataaaaattttaaaaatttagctgggcgtggtggcatgggcctgcggtcccagatacttgggaggcagaggtggcaggatcacttgagcccaggaggtcaaggctgcagtgagccgtgatcatgccactgcactctagcatgggcaatagagcaagaacctgtctcaaaaataaataagtaaataaataaataaaatagataacaaagaagtaacagtgtaaaaacatgcttagcctcactgatgatcagataaatgtaaattaataatgagatataaattgtaatctaaacagttggcaaataattttgagcaatacatatattcatcagtgggggaatggtaattgcacatacagtataatatactatatggttattaagattttggccaggcatggtggcttacacctataatcccagcactttgggaggccaaggcaggtagatcacctgaggtcaggaccagcctggccaacatggtgaaaccccgtctctactaataacactaaaattagccggcatggtagtatgttcctgtaagcccagctacttgagaggctgaggcaagagaactgctggaaactgggaggcagaggttgcagtgaaccaagatcgtgccactacactctagcctgggtgacagagtgagactccgtctcaaaaagaaaaaaagattgaagatttcatgtatgggcatgaaaagatatcaaaagcacattaggtgattaaatgcaaagtgtagaacagtaagtacagtatgattttgtacaaaaaaatacatatagtgtacaaaatagaaaaaaagacaacatatataccatataaactgtcaggactgggtatctaggttgggagaggtggggagtcaagtagggaaaatggcatgtattacagcatctattcatgtcgggtacatatttctatattgattgagagtttttcccccaataagttattacttttttaattgagaaaaataataaattaaaaataagataatgttatgaacattttaaagagacagttggggccaggcgcagtggctcatgcctataatcccagcactttgggaggccgaggcaggcagatcacctgaggctgggagttcgagaccagcctgaccaacatggagaaaccccgtctctactaaaaatacaaaattagccaggtatggtggcacatgcctgtaatcccagctactcaggaggctgaggcatgagaattgcttgaatccaggaggccgaggttgcagtgagccgagatcacgccattgcactccagcctgtgcaacaagagtgaacctccgtctcaaaaaaaaaaaaaaaaaaaaaaatgccaggcatgctgacatacacctgtagtcctagctactcaggaggctgaggtgggaggatcacttgagcccaggaagtcaaacagctgcagtgagctatgattacaccactgcatttcagcctgggtgacagagcgagaccccgtctctaaaaaaaaattaaaataggatcatgctgtcttataatttgctttcttcattcaaaagtatcctatgagcatcttttcatgtcaataagtatactttgatcacatgataggtatctgagaaaaacagtgtccagttaccaaggcaaagtgccactttgattgtcagggctcctgtgtggttacagtaagggcaggtgaagtcagagacctagatgactcatccattgtgtggcacgagaccttacagagccaagagtgctgctggcagttagggtagaaccagcttctggagctgttctgtaattccttcttttccagcaagaaaactttttaagcttcttatatctctgatgcatacattcttcccccaatggatcattttgtaagctaaaatttaaacactagaatcaagcagttctataatttcttttcaagccttatttctacttgatgaagtggctttcaagagtatattcagaagagtaatagggtgagagacttaattcccaaaatagctgctaatcctgtttaattcctaggttgtttgtcctttctttcttagttgaaagactggtgagtcacagactacaggagagaaggtattggagtttgcagtttgttgggaaggtggtgctgttcaatttatttaggagtacagtcctttcaaagtacgggacatttaatttaatttaatttttctttttttttttgagacagagtctcactctgtcacccggactggagtgcagtggcgcgatttgggctcactgcaacctccgcctcccaggttcaagccatttttctgcctcagcctcctgagtagctgggactacaggcgcgtgccaccacgcccagctattttttgtatttttagtagagacgtggtttcacggtgttggccgggctggccacgaactcctgacctcaggtgatccacccgcctcggcctcccaaagtgctgggattacaggcatgagccactgcgcccagccgggacatttaattttcaacaagcgtgtttcctctattatggaacaacagtgacaatttccaggttgttttcagtctgtcttacatgtataaattaattccatttttggccctagtgaaagtgaactctcttagatatgtaaatgtgtgtcctttgatcatctgagtgataagtagtggtatttgcatttgaagcctgcatattttacaaccagaggatctgtaaaacagtgaatttcttgataactgagaattttttttttttttttggttgggggatggcgtctcactttgtcacccaggctggagtgtagtggcgcagtcttggctcactgcaacctccacttcccaggttcaagcgattctcctgcctcagcctccagagtagctgggactatgggtgtgcaccactgcacccagttaatttttgtattttttttagagacagggtttctccatgttggtctggctggtctcaaactcctgaccttgtgatccgccggcctcggcctcccaaagtgctgggattacaggcgtgagccaccgtgcctggccctgataagtgagaatttatacacagataaacttgtagagaagagcagggaaaaaaaaaagattaaattcttatgaaaaataaaatttgactgctcatatgcatgtaaattatgtcagatataactaaatatttatgcaaatacttggaaagtctggggacttctccagggttctacaaattgtttcaatccttgctgccactatccgtaattaatggtatagtttcagctatcctgcaactatcctgcatctttgtcttatttaaaagaagaaaaaaaaacccagcagaatttaccatgttattttatggcaggtaatgatgaactttgctgatgtgtagttacagtgtttcaagcacttgtattttgctttttctttcttgtttttttccccattaatctttgggtaaaaatctcttgtttcgcatgtaactatcattagagctgggtttgcctttcttctcattttgtccttataaggccatcctgttttatcacttcctgcttcagctcctgagtttttctctcttcccctctccctctccctctgccgggtggatgctttctccatgtggcaaggctgtaactgttcacagctgtctgaaacagcagtggaccaggagcagcttggagttttaactttcattttacaaagaacaacatgtttgaatgtttcagcaggcaagttataactggcatctacttcttgttcttctagaacaccgaaaatctctcccagcactttagaaaggggaccctgactgtgttaaagaagaagtgggagaacccagggctgggagcagagtctcacacagactctctacggaacagcagcactgagattaggcacagagcagaccatcctcctgctgaagtgacaagccacgctgcttctggagccaaagctgaccaagaagaacaaatccaccccagatctagactcaggtcacctcctgaagccctcgttcagggtcgatatccccacatcaaggacggtgaggatcttaaagaccactcaacagaaagtaaaaaaatggaaaattgtctaggagaatccaggcatgaagtagaaaaatcagaaatcagtgaaaacacagatgcttcgggcaaaatagagaaatataatgttccgctgaacaggcttaagatgatgtttgagaaaggtgaaccaactcaaactaaggtaagaattgggcgggtttgaaacttgagaaagccaattcaagcactaaacaaagctgtttttccaatctagctattttgagtagaggcgaatatgtggtcagtatgtcttttgattccagttagataagttaatagtctcaaatgcattatttacatagatgctaagatttgtgagtctctgacacaatttcatgttaaatcaggttcacactgggattcaaattggtatctagaaatgaagagagtttaataccgattggattatgtgtttttgtacacttgcccttttaaattgtcttcctgtgttctttatcatttgtagctttgggggtggaattactgctgaatagctctctgcttggacacagctgcagactgagtgttaaggccggagtttaacattaagactgaggcttacttgtctctgctagctgaatcccttctcttcttctcaacttcctcatctgtgccttccaacaaatgttttctatcagctaaaatcctctctcaggcaaaatcaatgaagatagccagactagctatagctttcgggagttttgacttgcaaatgcacagggttgcgttttcctacaactgctaatgaaatttgatccttcatgtggattgcagacctcgtccccagagggaattacttaactagaaaatgagttacatatgctggtgatttataacacaatccagaggccacagagctggtaaatttttccagttttctcatactttcctatatatctggctttgtacatggggatggttcgttacaacagtcgttataatgaaataaacagacctgatggggagcaaaaccatctgttactctagattccacctagatgggaaagctggattttttttaagctaaatatttggcccaagtccctatgtttggaaagtaatataataatattaagcattctttctgagataaaaaataactcatcctgtagtcttcagttatattagatgtgatattgtcaatcccttcccatgacttgcagtgccagtcacttttctacttagaattagaaaagttcttgaatgtttgcgggtcatgtttgaagttgtgcgagtttttgacgatgtgtaaagctacaacacttctctgtgcatgagctttagctctactttaacagtgaaaccagttggcaagagatgtaaccacaaagcagttttataacgtttcttaactctcttccctctcaagtttttagacctttagtcctgccaactccttctttcccctttatggttttaatttaaaaatttgttttatttaaatgggaagaagaattttaagtggaaggaaaaaatgtcagaaatcctaaatagagaggaaggggttttgttgtgactcaaagcaccattgtaagtctcctcctcccagaccctgctaggaacaggacagctgatgtcatgccagtacacacaatgtagattcagtgcaaaaggctgctgcatgttgaaactggccaaaggtaggaaatgactgggactgtagcagacaaaaatgctgattatgtgtaaggatatggtgagacactttttctcataaatatctagtgagatatgggtcagaacaagcctatctccctaaggctgcttggagaggagaaaaactttccatataagatcttactagtccgggcgtggtggctcaagcctgtaatcccagcattttgggaggcagaggttgggggatcacttgtggccaggagttcgagaccagcctggccaacatggtgaaaccccgtctccactaaaaatacaaaaattagccaggcatggtggcgttgctggtagtcacagctacttgggaggctgaggcaggagaatcacttgaacctgggaggtggaggatgcagtgagccgagatcatgccactgcactccagcctgggcaacagagtgagactctgtctcaaaaaatatataaaaataaaaataaagatcctactagatggctgatagcactgggccaccagattgattgctaaaggtataggaagatggaagaggctgggcacggtggcttacatctgtaatgagaatttagggaggcccaaggcaggaggattgcttgtgcccaggagtttgagaccagcctgggcaacatagccagacctcgtctctactaaaaatttaaaaattagccaggtgtggtagtatgcattgatagtcccagctacttaggaggctgaggcagaagattgcttgagcatgagagtttgaggttgcagtgagccatgatcgccactgcactccagcctgggcaacacagtaagatccctgtcccttaaaaacaagaagatggaagagacataagattcacctgggcttctaggtttcattgctttttgtgtgtgccatttttaatttcctgatttgtcacttaatggactgcttagggagtggaaaacacagccacccttggttttattgctgtttgtaaataagcatcattgtccatactgaaaacagtctagattatatttatttatttatttatttatttttgagacagaatctctcactgttactcaggctggagtgtattggtgcgatctcggctcactgcaacctccatctcccaggttcaagtaattctcctgcctcagcctcccaaatagctgggattataggcgcccgccaccacgcccagctaatttttgtatgtttagtagagacggagtttcatcatattggtcaggctggtcttgaactcctgacctcaggtgatctgcctgcctcaagcctcccaaagagctgggattacaggcatgagccaccacgcccagtctcagtctagattatttttaacagttctgtcaggtattctatagtctgagctcaacctacctgtatagtctcacagccaatcttatactcaaaccttggaatactcatcccccaactgctactttttgaatcttttattcttaatatttcacgttttaacttcagtgtgtttatactttttgaaatgagaccagaacatagtagactttatagagaagaccagttttacctagattccaaaggaagaattaaactgctgttattgtttgaaatgcgttttttttttgtttttgttttttttttttttatggagatagggtcttaactctgttgcccaggctggaggagtacagtggtacagttatggctcactgcagccttgacccctctgcctcagcctcccaaatagctggggccacaggtgtgtaccaccactctcagctaatttttaaaattttttatggagacagcgtttcgctatgttgcccagactgttcttaaactcctgggctcaagtgatcctcctgccttggcctcccaagctggtgaaattacaggcatgagccaccacacccagcctgaaattcttaaaggatgagaatgtcaatgacagagcaccttggcatcattgtgactaacctgggagacagggaagaagcacgccatgggaagtgtttacatttgggtacagctgtgctaagtactgtggagcccatagccttgaggtagacggctactttgccttttttcttgaactgtcttgcagaatgtggatttggggtaagtggtcttgaagcactcatttagtcaccctcaaattaagatttttacttcatctttcttgggcctgtacctccaagatgacaaagaaaagaagaaacaatggtcacaccaaagagggccgcaaccaggtgtacgctattcactgcagccaatttgctgcataaactgtgcccattgtgtgcccaatgacaaggcttattaagaaattcatcataggccgggcgcggtggctcacgcctgtaatcccagcactttgggaggctgaggcgggcggatcacgaagtcaggagattgagaccatcctggctaacacggtgaaaccctgtctctactaaaaacacaaaaaaattagttgggcgtggtggcgggcgcctgtagtcccagctactcgggaggctgaggcaggagaatggcgtgaacccgggaggcagagcttgcagtgagccgagatcacgccactgcactccagcctgggcaagagtgagactccgtctcaaaaaaaaaaaaaaaaaaagaaaagaaattcatcacttgaaatgcttgaaatgtagaggctgcggcagtcagcgatatttctgaagtgagcgtcctagatgcctgtgtacttcccaggctggatgtgaagctacattactgtgtgagttgtgccattcacagcacggtagtcaggaatcaaggtcatgaagcccacaaggatcgaacaccttccccccactgtagacctgcgggtgctgccccacgaccgccagaaatcaaggtcatgaagcccgcaaggaccgaacacctccaccccactgtagacctgcggtgctgccccatgactgccaccgaagcccatataaggagcagagttcttaaggactgaagaaaaactagcctctggagaaaaataaaaaaattgcaattgtacttaaaaaaaaaaaaaagattttacttcaaaggccaggcttgaagttctgaacactttgaagtctccaattatgagggatccagtctaagcctctggcttttgctatttagcaataggtgttctatgatgggctgatttggaaggagggagtcagccactcttgagccactgcagtgaagtcacttgatctcagtctggagagaaacactttaatagctaaacattctagctttgatttttctgaagggaatacacctgttttcaattctgggatttttggggtgcttgcttgactgtatatgaacttgtgatccaaggaaaaaataggagaaagaacaatgttggctttttaagtcaggatagttttatgtttgctactagataaggcaaaaataaaaacttatttttataaattcaagaagaaaagtaaggatgtttttataccctagtggtcaataacttagttcatagtatttatttaataaaaggaaggtggcattggtggtatagtggtaagcatagctgccttccaaataatgaaaattgattaaagcctatttctcagttattctctacatttgatgaatagataggttatttaggtcaggtggtttagctgaatatgatggttttatttatttatttttgaaacagagtctcattctattgcccaggatggggtgcagtggcacaatcttggctcactgcaacctctgtctcctaggttcaagcaattctcctgccttagcccccgagtagctgggattacaggtgtccgctgccattcccggctaactttttttgtatttttagtagagatggggtttcactatgttggataggctggtcttgaactcctgacctcaggtgatctgcccacctcagcctcccaaagtgctaccgcgcccagcctgaatgtgatggttctacttcctatgagtgaatgagtggtatatggattaatgtaacctatcgtcaaaagaaatgccacagtgggctgggagcagtggctcacgcctgtaattccagcactttgggaggccaaggcaggtggatcacctgaggtcgagagtttgagaccagcctgaccaacatggagaaaccccatctctactaaaaatacaaaaattagctggagatggtggtgcatgtctgtaatcccagctgctcaagaggctgtggcagaagaatcacttgaacccagaaggcagagtttgcagtgagctgagatgacaccattgcatcccagcctgggcagcaagagcaaaacttctctcgaaaagaaaagaaaagaaatgccacggtgacacttagtgagtgtggtttagcattcctaattccttatatgtattaatctggattttaggtggccaagataaccattcaggacagccttttatgaaaaagataactgaccaactagttatgacccatgtttagttattgtcatgttgcctttttttttttttgagacagcctcgctctgttgcccaggctggagtgcagtggcaccatctcagctcactgcagcctcccaggttcaagcaattctctgcctcagcctcctgagtagctgggattacaagtgtgcaccacgaagtccggctaatttttgtatttttagtagagacggggttttgccatgttggccaggctggtctcgaactcccagcctcaagtgatccacccacctcggccttccaaagtgctgggattttatattataaaaataaagcaggccgggcgcggtggctcgcgcctgtaatcccagcactttgggaggccgaggcaggcggatcacgaggtcaggagatcaagaccatcctggataacacggtgaaaccccatctctactaaaaatacaaaaaaaaaattagccgggcgtggtggcgggcgcctgtagtcccagctactcggaaggctgaggcaggagaatggcgtgaacccgggaggcggagcttgcagtgagccgagattgcgccactgcactccagcctgggcgacagagcgagactgcctcaaagaaaaataaataaataaataaaataaataaagcaatatattcaggtaaaatagacatatataaaataacaaaggaagtttcctttgactcatcacccttttctcttgtttgtgacctctccccgtagactcccagcccttcagcttccctctgaatttcagttcttattagcaccaggatcatgatatgtatagatagcatcaaaatgccaacaaaaacttcacttgttccaacatctttgtggtttttcttcttgtaagttcctggaagtgacacttggtattttgtttagttttgcataacactcgtacataagagtgtatatgcgctgatgtagtagaatgagtctttagagagtaaggcaaccaagctaaagtgtgatgatctctgttcatcaggtacttattcatagccaatctgtaatctgcatcaaagaaataatttatataggccttcttgatgaatgggtaggtgtccatagggaatgcccagattgttgcagaaattattcataacatcttatcttcctcttagttaataattgtatgtgttcctttatctacttaacgttaagataaaaaattttcttctgctttctgaatatgtcttatttagaattatatcccaagaagaatacaattctgaggatgttcataattgtattaattgcatagttttgtttgtttgtttgtttgctctgtcgcccaggctggagtgcagtggcacaatcccagctcactgcaacctccacctcccgggttcaagtgattctcctccctcagcctcctgagtggctgagattacaggcgcatgccaccacaccagctaatttttgtgtttttagtagagactgggtttcaccgtgtgggtcaggctggtcttgaactcctgaccttgtgatccccccaccttggcctcccaaaatgctgggattataggtgtgagccactgcgcccagccaaattgcatggttttaagttaaaattttaaagtaagtttggggaggaaaggtatttgaataactattaacatcaatgtggagtctatacagtcatctcaatgtaggggagtatatctttaatttgcctgtcagtgaatcttcacttttaccttgacctaacatttaatcttcaatagatacattgctagtgctttaaatgtggataattggttttgcatgttattgttaattgtacacaagaattgtctttgtttttctatcaatgcactttcttacatatcttggtaaaactaactttttgctgatttagcatattcacctatagtttgtagcttctcttgtcatttcaaaaatgtaaataaggctatcctcagcattattttgactgacatctatttatagtggtacatttcttgtaaagactacatatcagcataaattttttatttactcttaataactctgagtaatctcgtgtgtgtgtgtgtgtgtgtgtgtgtggtaagataataattgatccagggtaaagatgcagtcaaagaattccaatctttttaactgttccttgccctaaatgactgtccttgatgtgccagctagagaccactcatctcttcttctctgcttactttcatgtccactaactatgtactggtttttaaccagtttcattatagtaaaacatatcaacaagcaatgtcaggggactggaatattctttaagcaatgttggctatattagacttcaagggggctagaaagacttcatctccccccagtacaaatattactacctttgtcttcctgctagtgggctcattcctaaattagacaacacaggtgtgtatccagatgaatatatttacaagtcatttcctctagccttctaactcattctaactcatcagtgagttacaatgagtgagaaatcgctatcaaaattgttgacatatagatcctagaaccttaagagagtttaagaagttatttaatccagctcactgccctcagtcagttagaactttacaatcccaattttacagatgcgattagatgaggtcagagaagttaattgatatgccccatggcatgtggctaattaatatcagaacaggattgaaattgggtagtaccccttctaccatataacactatcttcatggatataataactatttattggatagaaacaatgggccctacatatctttgaaatctaaggaaactggcaaaaattgaaaacataaaaacagctatgttctcaaagactttaactctgtcttcccacagtttatgcttaactaattgaaaagcatcaggacagtgaacagaaggaatacattggaatgcaagagatatgaatgaaagcactggagttagaagcttgtgagtttgggacctggcgtggtggctcacacttgtaatcccagcactttgggaggccaaggcacaaggcacacttgtaatcccagcacttgaggtcaggagttcgagaccagcctggccaacatggcaaaaccccatctctattaaaaatacaaaaattagcctggcgtggtgacatgcgcctgaaatcccagctactcagaagcctgaggcaagagaattgcctgaacctgggaggcagaggttgcagtgagctgagatcataccactgcactccatcctgggcgacagagcaagactttgtctcaaaaaaaataaaaaataaaattaaaaagatataattcattaaacattgttcttacatcaaaaggtatgatttattgtttattcttatatattttcagcttgttctcaagattataacaccactagtacaatataaggacacattccccaaagcattagcatttggttttaccatttttgtctacttaaattaatagatatgacttgttatcctttcttttttttttcttttcctaattgtaagactaacacaaagtatttgtagaatgcttgggaatacaaaaaatgtagagaaatcctaccacctggagataaatctctttctatgtgtattattttacttacattaactctctttctaagagagtccctgaagaaagaaatttttctctcaatactttaataaatcaaggctaggttttatctatgccccgatttccatgcatagttcagcaaagctccatttttccctaaaagccaaccttcctctgcccttgactttggtgagatgacagcgtccaaaggaagctgaagttgaaaggttgaaggaagtggctaagtgaggcaggggactctcagtaaattaaagtgttgagaatcagcttttaaagataattttttctgaagataggtgtagaaaagacaggaaatcctgctttgttacttatttagaacctaacttactttatttctgttttaaaaaatacagaaaaaaattctacagactactgtctaaaacttttatcctcttactagtacatcttggtgcgtttgatttatggattcacagagaatatttaagggatgttcatactaacaagagttattgtcagctgacaggaaggaggacttcagggtgggtgaggccaggcctcaggaaattccagaaagtcttaaaagtatcttgtctattctctttccttgacattagaatgattaaggctccctcaagtgtctgagtaaaaagagctaaaatgtgataaaagtctgttacagaagagtattttggtatcagaattcgtgtgtgtgtgtgtgtgtgttttgtgttcctttacttccttgagaaatattggaggaaacccctccttcttcctgtacctcagattaccacttggaaaatgtggatcataaaactcatcttaaatgcatttgagatcatttttgtttgtttgtttgtttgcttgcttttgagacagggccttgttatatcgtccaggctggagtgccggggcacaatcataggtcactacagcctcgacttcctggactcaatcatcccacttcagcctccggagtagctgggactgcaggcatcaccactatgcctggctaattttttttttttttttttaaagcagagacagggtctcaccatgttgcccaggctgatctcaaactcctggcctcaagcaaccctcctgcctctgcctcccaaagtgctggattacaggcgtgagctaccacgcccagccttgttgttattcttttttttttttttttttgggggggtggggcggagtttcgctcttgttgcccaggctggagtgcaatggcgtgatcttggctcgctgcaacctctgcctcccaggttcaagtgattctcctgcctcagcctcccaagtagctgggattacaggtgtccaccaccatgcctggctaattttttgtatttttagtagagatggggtttcaccaggttggccaggttggtcttgaactcctgacctcaggtaatccacctgccttggcctcccaaagtgctgggattacaggcatgagccaccatgcccagccaagccttgttattcttaatgtttgagtggtttaaaggtgaaatatattgaaagtaatgctgtgcttcactgaacctgcgatatcatgaaaacccatcttacctcacagctgtgtttctcctcagagccacagtctgtatgagggatttttcagagacagttctcttcctatttttctctgagaccaaatggctttgttcatgtacttttttagtacttgaaataaattaatgcagagttttgatacccccatggagcaaaaggcttcaaaaaaaaggtaagggggccttatttaattaacccagcagtttaaattaaaagctaacaaagatgggaaattttatgcgtttaaaaccaaagaaagcctctgccctggcaaggtgtatgctctggttctaaatgattatgctcccaataacagcagtgcagggacttcacacaagacagagaaggatgtgtagctccaactagacagaaaacagctctctgcaggttgtaacatgtaacacatattcttggaattgtgcttgaactttgacagaaagcaaatatctgtattaagaacacagaacccgtttccttttggttgttcttttctttttttctttttttttttttttttggaaatggggtcttgctctgttgcccaggctggagtgcagtaatcttggcccactgcaacctccacctccctggttcaagcgattctcctgcctcagcctccccagtagctaggattacaggcacgtgccaccatgctcagctaatttttgtatttttagtagagatggggtttcgccatgtgggcgaggctggtctcaaactcctgacctcaagtgatccacctgcctcggcctcccaaagtgctaggattacaggtgtgagccactgcacccggccccttttggtttttcaaaagaagtttatcagtaggctttctcccattttgagttttgaaaattctaatttttgtagtggttatcttccagtgcagcagcatttggaataaatatgtggaattttctttattttaatgatcagcaaataagaagtatgttgaaaacaaaataaaaaggtgggccaggcgcggtggcttacgcctgtcatcccagcactttgggaggccaaggagggcagatcatttgaggtcaggagtttcagaccagcttgaccaacatggtgaaaccccaactctaccaaaaactcaaataattaggtgtggtagcagacgcctgtaatcccagctactctggaggctgagacaggagaattgtgtgagcttaggaggtgggggttgcagtgagctgagatcacaccactgtattccagcctgggtgacagagtaagactctgtctcaaaataaataaataaataaaaattaaaaatgtggattgagggtatcctgccagacatatcttttccttttgaccaagatcttcattatcttttttcttttttttttttttttttttgagatggagtctcgctctgtcacctagcctggagagcagtggcacaatttctgctcactgcaacctccatctctgaagttcaagtgattctcaacctcagcctcctgagtagctgagattacaggtgcgcaccgccaccccagctaatttttgtatatttagtagagacagggtttcacaatgttggccaggctggcctcgaactcttgacctcaagagatccacccaccttggcctcccaaagtgctgggattacaggtgtgagccaccgcacccaaccacttcattttcagatagcggctgctcctagagcaagagtatgttgagctgtgtgagtcatatggatgtataataattcatgaaagtatgcctgacctgtgtgtgatgtagcacggatagtgttgttccagcttgttttagtttttattaaaaatagacccaatcaggccggatgcagtggcccacacctgtaatcccagcaccttgggaggccgaggctccttgagcccaagagtttgagaccagcctgggcaacgtggtgagaccctgtctctactgtaaaaaaaaaaaaaaaagaaagaaagaaaaaatagacttaaatcaacaatataaattgcaaagctgactggatataaattattattattactttttgagcagggtcttactcatcacccaggctggaatgcagtagtgcggtcacggctcactgtattcttttttgtagagatggagtcttcctatgttgcccaggctagtcttgaactcctaggctcaaaggatcctcctggctcagcctcccaaagtgttgggattacaggcatgaaccaccaaacccagcaaggagacaaattatatatacacacacacacatatgtaatatgtatataatatatttttatttttattatttcttttgagacagggtcacactctgttgcccaggctggagtgcagtggcatgatcttggctcactgcaacatacacctcccaggctcaagcaattttcctactgcagccttctgagtacctgggactacaggcgcatgccataatgcccagctaacttttggttttttttgagacggagtcttgctttgtcacccaggctggagtgcagtggcctgatctctgctcactgcaacctccgcctcctgggttcaagcgattctcctgcttcagcctcctgagtagctgggattacaggtgcgggccaccacgcctggctaatttttttgcatttttagtagagacggggtttcaccatgttggtcaggctggtctcgaactcctgacctcgtgatccttctgcctcggcctcccaaagtgctgggattacaggcgtgagccaccgtgcccagtctaacttttgtatcttttttgtagagacaaggttttgccatgctgcccaagctggtctcaaactcctgggctcaagtgatccacctgtctcagcctcccaaagtgctaggattataagcttgagccactgtgcctagccttgggagatatattaaatatatattgaatttgaaagaaactattcttactggtgtggtataaacagaccaatccttggctctgatttctgatgtggtatgttttctgtctccaaggagggggtataaaaaatatgtaaaagtgatagttcactttcttttctttttttttttttttgagacagggtctcactctgtttctcaggctggagtgcagtggagcgatctctgctccctgcaacctctgcccccctggttcaagcaatcctcccacctcagcctcccaagtagctgggaccgcaggtgcatgtcaccacacctggctaattttttgtatttttagtagagacagggtctcaccatgttgcccagtctggtctcaaattcctgagctccagcaatctgcccgccttggcctcccaaaatggtggttttacaggtgtgagccaccatgcccagtctcacttcctcaaactttacagtaaagttgattagtccattgaacttaaagatttagtaactatttactaatgttaaattcaaaagggtgctaagtgttttattcttatctcctgtcatactggatttcagatatcttttttaacctcaagttgtctggaaataaactgagatttgaatgataggatctgatgtaaggatctcattataagctgaataaacatgacatactccctgtgtactatgtctgggaatattctttgacactacagtcttaaaaattataatttgtaactttcattaaagatctaccttagatatgacagagataaatgtagtaatttaatggaatcacaaaacacttcattaaaaaaaatctttgttggccaggcgcagtggctcaagcttgtaatcacagcactttgggaggccgaggtgggcggatcacctgaggtcaggagttcgagaccagcctggccaacatggtgaaaccctgtctctactaaaaatataaaaattagctgagcatggtggcaggcgcctgtaatcccagctactcaggaggctgaggcaggagaatcacttgaacctgggaggcggaggctgcagtgagccaagatcacatcactatactccagcctgggtgacggagtgagactctgtctcaaaaaaaaaaaatctgtgtcatccacttttctgtaagtcctggaaatatatggacaaaaaggcatggtctctgcccttagtgagcttacagtgcagtagagggacagtcacccaacagtttgaccaggtaccttgagaacagaggaaagattacctaaatttatgttggcaaggtactcagacttcatagtgcttacactgagtctttgaaggaacaggcatttgtaaggcaacagaaggacaaaggaggctggctcggtagggaccagatctagaacaggacttctgtgacttactaagcacttcgagtttaatttcaggaatgagtaggaatgctgaaagaattttgaaaaggagggtaaaatagatttatatttttggataattactttgtattattggggataatggtagcatcatagagactggattggaagataatgaagaaccagttaaagaggtataatgcagtagtccaggggaaagatgatgaagacatgaactaaggcagcaatagcagaaataacatgagacggagaaaggaaacagcagattctgcatcagcacttggcagtttagaaggacatgtcattgtcatctggtatgtgaggattcccctccaataagtgttacaaagcttgctggttaggaagccatctttagcagagaatattacctatatagggttacttatttttccctgggcacctgtgaatgtgtagtgcttgatatttgtaatttaaaaaaaattctatagaatataaaatataaaatcaaatctggattttatttataaagaaggtttgcaagttgaaccttgcgtcaagatttcccattgtttctgcaaaacttatcgttgggtttcgttttccagattctccgggcccaaagccgaagtgcaagtggaaggaagatctctgaaaacagctattctctagatgacctggaaataggcccaggtaagcagagagttccatgtgtatgaggtcctttaggaagtactcactagtagtaacatcttttggactcgaagccaatgcttttaaaggaagagtggcacaaattaaaaggaagtctgcctattagatgcaagccattctcaaatctcattgctctcgataaatagctttttttttttttttttttttgagacggaagttgacgtgctcccaaagtgctgggattacaggcatgagccgtcatgcccggctgcttttttcatatttttaatccacccttgttagtggtaacctatggtaagcaaagggtactttgaggagctataagtaaagtgctacgatcagttttgcctccagtcatctggggtttgagggcttcagtagatgggctgtgtcccctatcaggtttggttaccctgtattaccagtgataacataacactttgagagtggaattatgttttaaaggggacatatacaggcacttcacaaaagaaaaaattagtaaaaacaggaaaacatcagctacctagtcatcaaagaaatgtaaattaaaaagcattgagatctcttctttttcatgttaaattagccagaattttaaaatacgagcccaggcatggtggctcagacctataatctcagcacttagggaggctgagacaggaggaccacttaaatccaggagtttgagaccagcctgggcaacatagacctatctctacagaaaaaaaaaaaaaaagcccagcgtggtggtgcatccttgaagtcactgctacttgggaaactgaggtggttggatcatttgagcccaagacttcaaagctgcagtgagctatgattgtaccactgccccatactctagcctgggtgacagagtgagaccctgtctcaaaaaataaaatatgcaatcctcaattatggtaaggttcttttaatgctaagaaagtgagtgaatattactttataaatgacaattatattcctgattttcttcttcgtgcttttaacagaagatattggccattagataaaaataacccaaaatttagaattttgaaattatttgaatcacttttatcttctaataaaacatgttggccagtcacggtggtttacacctataattccagcgctttgggaggctgaggcgggaggatatcttgagctcaggagttcgaggctgtagtgagctatgatcgtgccactgcacttcagcctgggtgatagagtgagaccccatctcagaaataaaataaaacatgttatttggatgcttccaggtcagttgtcatcttctacatttgactcggagaaaaatgagagtagacgaaatctggaacttccacgcctctcagaaacctctataaaggatcgaatggccaagtaccaggcagctgtgtccaaacaaagcagctcaaccaactatacagtatgtgttctgcatcattcattcattcattcattccatcatccagcagatggtcactgagtactggaattaggaaatgtcaccagacccttgtatctgagccctggtcccctagctgttctcttttcacatgaaccctaccctcgctggatttgcagttcttaccatggtctaatcctgactttgctttcttagtcctggttcccaccccactcactttttttgtgatgttaccagtgagtatcattgagagtttccctggctcttctacttaatctttgtgttgttaaagaagtagtattttattagttttaatataactcttattttatcttggttgttgagggaagaaggaagaagactgaagagcttattttggcttttgagggaagaaagaagaagactggagagaaatatcagctgtgttcattaacgagggttttttttgtgattttttactgagatataactcacataatataaaatcaccattttaaagtatacaatcttgtgatacttagcatattcacaaggttgtacaaccattaccactgtttaattccagaacctttccatcaccctgaaaagaaacttcatacctgtgtagtcactcccaacttcccctgctctcatcccctggcaaccacttagctacttcctgtctttatgtatctgcctattttggaaatttcatatgaaggagtcatacagtagatcttctacttaatctttaatccttacgatgtactgttttcctaaagaagtagaatagtagataaggaaaagggagagatcacaagaaggtgacgtgctcagtaagcatgaaaattttgatattcagctgggtgtgatggctcacacctgtaatcccagcactttgggaggccgaggtgggcagattgcctgaggtcaggagttcaagaccagcttggctaacgtggtgaaaccccatctctactaaaaatacaaaaattagccagcatggtggcaggcacctgtaatcccagctacttgggaggctgaggcaggagaatcgctggaacccaggaggcagaggttgcagtgaggcaagattgcgccactacactccagcctgggcgacacagcaagactccgtctccaggaaaaaaaaaaaagattggtattcaaaatacaatggagggtccttcccctttacgttgtcctgtgcttaacgggtaagctgatgctacagaactgctaaattgaagttaccttatagccaggcgcaggagctcacaccgtaatcccaacactttgggagcctgaggtgggtgggtcatttgaagtcaggagttcagaaccagcctggccaacatggtgaaatcccgtctctactaaaaatacaaaaaaaaaattagccaggtgtagtggcacacacctgtaatcccagctactagggaggctgaggcaggagaatcacttgaacctaggagatggaggttacagtgagctgagatcacaccactgtactccagcctgggtgacagggtgagactccatctcaaaaaaaaaaaaaaaaaaaggaagttacctttcaaatgccatttattcacatatatatgtatacacacacatagatacaaatgtacacacacatatttttgtatccttcaagcatttgttctaagatttcaaattacaaaccattaatctcttgatgtcctaattgtctaacaaaatcaaaaagaacaatattgaattttatttgttcttaggcagatcgaaattggtgcatattggaaaccataatgagtattctgggagttaagccttctcttccccacattattaagtatacattctctaataatatttggtggactaattctctgggcaatgaataatttcatcttggttttttaactgtaattttaacaactttatgttttaagaagagatgatgtgtgtaaatcaattagcaaagtggagtatcacaggctgattatgcaccgtgaatgtgaaaagcgagcaaatttagacttcccttagaaggcaggtcaggagatacagcaaattgggatctgcgaagctgaacttcctcttgttaccagattttactgcttctcagtgccctcctgctgtaaacattcccaccaggtgactccctatgtggggaaacctgttgagtaactttttttttttaactcctaaccatttctgcattacagttctcctgctctggagattttaagagttgaaaactctttgggaattcttgtaaaaagtacattttgtctcatccccaaagaatttcccaggccccttacagaatatggttgtaacaaggcacatacatactctctggcagcagttctggaggtggggctttgagatggggtcaggaatgagttgttgggctatataatgttctgcagtgctagctgccagctcctcctcacagatgcacctccggtgctgtgggtcgtaatctagaataccatcactaggtgactaagtcatactcacattcctttcattgacctggtggccataaattgtttcctcccatgcctaaagattcacagagaacagaaaagtactagattactacattattagcagactaatggtgggaaatgtctatagtcatcgacctctatgtttattttattttattttatttttttattttgagatggagtttcactcttgttccccaggctggagtgcagtggcgtgatctcggctcactgcaacctctgcctccctgattcaagcgattctcctgcctcagcctcccaagtaactgggattacaagtgtgcaccaccacacgtggctaattttttgtatttttagtagagacaggatttcaccatgttcgccaggctggtcttgaactcctgacctcaggcgatccacccgcctcagcttcccaaagtgctgggattacaggcgtgagccactgcacccaggttctatgttgattttagatgtaatagatgagttaattgtaatattcaccccagtgtcctttgcaaggaaaaaaatgcaattatccttattccttatgacaataaaatgcatgttcttttatgttgaggctctgttttgagaagtaaaataaattatgtctttagtacaatatatgaattgtatatggaaaaacatgctttttgaaagtcccaccaaaaaggtttctttatggtatcattaaatataatttcagtttttatatgtatacatcatccctgtctctctttccaggccgggcatttatatatgtatggtcagtatattttctattattggcacttggcatctcctttcccctgctccagaatggtcttttctgataaaactcacaagctttgcattaccacaagctctgctgctagaagagtgaatcacaagaatgttgtatgcttggggtgttctgtgtgcctgtgttgatgtgtctgtattctaatgagcaatccagttttacactagcatacagatatttaactctgaggtatgtgtccacaaagctgcttttgtcatttcactagtcagtgggttttgcttgtgagagttagggggttgatttgacccgaggcttcttagaagaattttttaacattccaagtttatctaatagatgtgctatgaagagaacagaatgatgggactttaaaaaaatttttacagttatttttattttgtagaatgagctgaaagccagtggtggcgaaatcaaaattcataaaatggagcaaaaggagaatgtgcccccaggtcctgaggtctgcatcacccatcaggaaggggaaaaggtaggttgaaaagtctgatgtccagttgccaaggaagcatgtgttctaaattagatgcttgaaattagaaacaactctaactctaggctgtagagtgtctgggaatttggtaacagctgccaggacagattgccatttttgcaggtcacataatttcagttgagtagctctgcaacttatagctgaccaaataatgagccttcattggaaaattattttgctcagcagatgctcagaaggcaaagagctgaagtgattttttaaaatctatttggaggctgggcacagtggctcacgcctgtaatcccagcactttgggagggtgaggcaggtggatcacctgaggtcaggagttcgagaccagcctagcccacagggtgaaaccccatctctactaaaaatataaaaagccgggtgtgggggtgcatgcctgtaatcccagctgctcgggaggctgtggcaggagaatcgcttgatcccaggaggtggaggttgcagtgagctgagtgcactgcactccagcctgggcgacagagcaagactctgtctcaaaaataaataaataaaataaaaatctattcgggccgagtgtggtggctcacgcctgtaatcccagcactttgggaggccaaggcaggcagatcatctgaggtcgagagttcgagacaagcctgaccaacatggagaaaccccgtctctaataaaaatacaaaaaattagccgggcatggtggtgcatgcctgtaatcccagatactcaggaggctgagacagttgaatcgcttgaacccaggaggcggatgttgcagtgggctgaggtcacaccactgcactccagcctaagcaacaagagcgaaactccatctcaaaaaaaaaaaatctatttgggagagcatagattcagggcaacttgattccatgctcctgggaagaataatttacaaaaataaaataaaaatatatttgattagagattatcttcagatactcatatattcttaatttaagtatacatttaacacattttgtgcaagaaaatcttactcttccactcatattattttgaaaggcagtcactatgctaagtaagcataggaaataataagcttaaaaacttattgacaaaccattccatgtggtctttatgtgcaagaaaacagagtagaggagagattaataagaggtcagctatcataaaaatgtatgataggtgctgtgaggctgtgagaggggtatacaggaccacagaagcccagagcaaagatatttaacctgacttcctcaagaaggtgatgtctgagctgagtcttgaagaacgtgtggaagtaggccaagtgaatgaggggaaggttgagttagaaatagaaggctattccaggcagatacaacagagatttggaaaccagagatgatggctgaggaattacagggattgtttgtttgtttggagatggagtctcgctctgtcacccaggctggagtgcagtggcgtgatctcagctcactacaacctccatctcccaggttcaagcaattctcctgccgcagcctcccaagtaactgtgattccgggtacgtgccaccatgcctggctaattgtttgtatttttagtagagatggggtttcaccatgttggccaggctggtcttgaactcctgacctcacgtgatccacccgccttggcctcccaaagtgagggattacagctgtaagccaccgtgcttggccagaattacaggtttgctgacttggctggagcatgaggtacacataggcagcagtgagagacaggtggaaggagagggctagggtaaatctttatgtcacccttaagggtttggatgtagtggtgcagcaggagaaagccactgaaagattttaagcaaatcatatttgtgtgttatgtattaatcattagatgaatggcttaattgaaataagtaacattatttatgtcaggggaattatcatgttctctaccattgcccattgtccaattcttttagtctttcagtcaatatgataatcgaatgttaaatgagatgaggagaaagggttttcaaatctattacagtgatttaatcttaggagaaaagccattgcttctgttacacttattgacacccttgacgccattcttccaaaagacatggagatcattaaatggattaagagcaacagttctcaagcttagttggaatttgtattttttaaatttttttagagatgaggtcttgctctgtcacccaggctggagtgtagtagtgtgatcatagctcactgtagcctccaactcttgggctcaagtgatcttcctgcctcagcctcccaagtggctgggactacaggtgtgcaccaccacatctggctaatttatttttatctttattttttgtatagacagggtctcgctataattctcagaatggtctcaaacttctggcttcaagcaatcccctcagcctcagcctcccaaagtactggaagtacaggtgtgaaccactgcaccctgtctcaaacttatttgactacaacagactttacaaagtaggatggtatattgtcagaatactaacaggaactcatgagatatactactcttggatcaaagcagacccacagaaaaatggtctcaaactgatggctacaaaatttgattcaaagaccagaacagaaaaaaatattagaatagtttattttataaaaacatcacaaatgtatgttggaataacaagacaaaatacttggcagtcatgtgttacatggtcatataatcccccataaattgcaaacatccttgcagcagtggactcaggcattagcccatgaggcacatgccatgtattaagtgagttatcttgttaaactgtcttgttttctcatcttttaaatgggagattatttcttaagaataactgactaaatatttttgaagtttttcttatatactgttaaaaaaaaaaaagaaagaaagaaattttaagagaaaaatattcccagcattgaaatatccccatctttatcccaggagcatagtttgggaaacagtcatttgggaaataatgcttgaattgtccctgtatctaaattcatgtttccttcgtcattgtcttcatgctgatttgaaactggaactctgaactgaactggaagattagaacattttaattatagcctaaaaggacattagtgcgactgtgaatcatgaagtgggtggggaagaaaggagataaagacaatacatattcttcaagcacatgctgcaggtttacaaaccctcagctgccttaaaattcgcaatgtttttcagacccttagctatccttttggctgtttgcctagcttttgttaaccaatacctaagtgttatttgaacttcagcttgttaaaaaaaaaaaaaggacatgtgcctggcgaggtggctcacgcctgtaatcctagcactttgggaggccaaggtgggcagattacctgaggtcaggagtctgagaccatcctggccaacatggtgaaaccctgctctactaaaaatacaaaaattagccgggtgtgataatgggcacctgtaatcccagctactcgggaggctgaggcaggagaatcacttaaacccaggaggcagaggttgcagtgagctgagatcgcaccattggattccagccttgcaacagagcaagactccattcaaaaaaaaaaaaaaaaagcaaagattacctcacaggttcaaggtgaccaaattaaaggtgagagaagaacatcctgggatggaggtacctactaattctcaagaactgaagagctttttgtaggcatgcacaactttcagaaaatttatttcatatcattagataaaatagtgcatttgtaaggcgattagttgaatacctggcacatagtaaacacccagtaaatgctggctgtgattgtaccggtttattttatgccatgtcagaattcctgtaatgaagagagtagtggaaaaaataaccacgctgaaattcaggtgcagtcagccagcagcttaatcttcattgtaaatctattcagtttgtcagacatcctgatataaacactcagcattgcccataaaatccgtggcatctgaataaaaggaaattatgtgaagagtgcacattgggtcacctgttgactcttcatgattttggatgtggagtaagataccaggaaggcatgggggccagtagaaaggagggagagctctaatagagagttcttttatttaaatttgatggcttttgagaaaatgatatatacacctatacgtaagatctgccatctttttaaacattgccattttgagactgggattagaagggaaactgtcctcaaagataatactgaggttagttttaggtaaatttgttttataactgtcaaaaggtcttctatataggcaagctcgtttcagcaggatgtagttggttgggaaataagaattaggaaaattaaaaaataagaatggttcctatatttaaatactttatctttccttggagtgggttatggttatacggtgaggagctttgctctccttgatagagggctttgttttgctttgttttttgagagcagaaaaatatggtttagaagttgttttataaagggagatgatgcacacttttggcagttgagtgcagtctgtttctcgggttactctgtaattgagaggcatgttaatatcctcataaaagacattttgctgcctcttgttcaaatgctcagctgttctggtgcccgttatttcccctaggcagccagtgactgactggagtcagcaggtttttatggcattaacagcagtttgctcttttatttttaatatgactcttaatccccctctaactttttttttttttttttttttgtagatttctgcaaatgagaatagcctggcagtccgttccacccctgccgaagatgactcccgtaagcattctttcttagatctggaggatgaggttcttgttttctatctgtatttggttcaggggtgttcccattactgtcagtgctgagaaaataacatagtaaatcctctacttgaatttaagggctaatgcttgaatgtcctttacacacttcatggcttaaggagaagttaaattcaattgaatatagttaacttgggacaaactgaatacttgtaatgcttttctcattgaattcatcctactttttgcaccaaaccctttcagaattgaagctgtataaactaattttgaagtttcattttaacagaagtttggccaatacggattttattcatttataatgttattcataaatacctattctttagtgaataagtatttgaataatctgttaaagatacatattttttccctgtttatctaaatgtatattatagtcaacctcctagccaggttctagggattttcctgctgacagtgaattttgtcacctgtcatcctattttggagtcattttgagcctcccttttcccaaagacaaaaatgtttttttttgttttttacttgactatgtccactttttattctgattttcagtataacttttaattttcattttttagagacagggtctctttctgttgcctaggctggagtgcagtggtgtgatcatagctcactgcagcctcaaactcctgggctcaagcagtcctcccacctcagcctcccaaatagctaggactacaggcacacaccaccatacccagctaattttctttgagggagtctcactctgtcacccaggttggagtgcagtggtgcaatctcggctcactgtaacctccccctcccaggttcaagcgattctcctgtctcagcttcctgagtagctgggattacaggcgcacaccaccatgcctggctaattttttgtattttagtagagacagggtttcaccatgtagcccaggctggtcttgaactcctgagctcaggcaatccacccgcctcggcctcacaaagtgctaggattacaggcgtgagccaccgtgcctggccgtacccagctaattttttaatatttttgtagagaaaaggtctcactttgttgcccaggttggtctccaactcctggtctcaagcagtcctaccaccgcagcctctcaaagtgttgagattacgggcgtgagccactgtgcccagcccatttaaaaatatatgttgctgggccaggcgcagtggctcacacctgtaatcccagcactttgggaggcctaagtgggtggatcacttgaggtcaggaattcaagaccagcctggccaatatggtgaaaccccaagctctactaaaaatacaaaaattagccaggcgtggtggtgggcgcctgtaatcccagctactcaggacactgaggcaggagaattgcttgaacccaggaggtggaggttgcagtgagctgagatcgcaccatcgcactccagcctgggctacagagcgagactccgactcaaaacaaaatatatatatatgttgctggccaggcacggtggctcacgcctgtaatcccagcactttgggaggccaaggcgggtggatcacctgaggtcaggagttcaagaccagcctggtcaacatggtgaaaccccatctctattaaaaacacaaaaagttagccggatgtggtggtgggtgcctgtagtcccagctactcaggaggctgagacaggagaattgcttgaacccaggaggtggaggctgcagtgagctgagatcatgccactgcactccagcctgggcagcagagtgaaaatccatctcaaaaaaaatatatatatatatatatatgtatatatatgtttgctgggcgctatggctcatgcctgtaatcccagcacttcgtgaggttgaggcaggcagtttgcttgagctcaggagttggagaccagcctgggcaacatggtgaaaccctgtctctaccaaaagtaccaaaacttagctgggcatggtggcatgcatctgtggtcccagctacttgggaggctgaggcaggaggatcacttgagcccaggaggcagaggttgcagtgagccgagatcatgccactgcactccagcctgggtgacagagtgagactctgaaaaaaaaaaaaaaaaaaaatatatatatatatatacacacacacacacacacacgtatatatatgtatatatatatacatgtatatatatatcatatatacatgtatatatatatcatatatacatatatgatatatatgtatatatatatcatatatgtgtatatatatcatatatacacatatatgatatatatatactatatatatataaatttcttgtaggtcacaagacaaaaaagaaaaacatatatatgtggatttctagcatctccccaggctagtttactggacactgaaaaccctacaactgaaatagaatgatgaattaaacagatctctagttaatcctaccttaaaatttcggagaaaaactccttctgcttgaatccagaaacattctttttttgcaatcatttttctgggactagaaatgtttctgagaaatgtttttgactaggtttatgaaacatttttttgaaaaataagccttaatattttagtactttgttgactcacctcttcattttggcaggaaagtaactcatgtagttggaatttcaatgattatgaaaaaaacttcatggagcccttttccataatcttcatccattggtatctgctatagaactgaccaaaaacagtgtcaggttacatgtatacacaaatgcgcgcacgcgcgcacacacacacacacacacacacacagagtacaaaatttctgccctcacatctccccctttttccaacttcagttgaaacacttcagaaaaagttattaggaatgttaatgaccaaaaagacatctaagtctataaacggcctttaaaaatgacaaatggcacaaggaagaaagttctttatacagagtggtttggatttctgctacgtgtggcagagggtaagaaagcctcctcactgagaacctgatttctgacaggaccagagaatacctgagccatagttgttagtgttcgaatattcttcaacagaaaagcagtgtttttcctggtgttggaaggatctgtcattaatgaaagtgcccaaactttgcttttcggaagaacactttccaagacattccatgagatactgtaaaatgtcttccttttgtaactcaagcaggtgactcccaggttaagagtgaggttcaacagcctgtccatcccaagccactaagtccagattccagagcctccagtctttctgaaagttctcctcccaaagcaatgaaggtatgatggcaatttctctctgagcctttggacattggtctactggtagagctaattgtaccttttatgatgatgatgttgattataacctggttttgctttcctgtggatgataatgccacagaagagcacactgaagccagtcgctttccctggaaatcttgctgcctctgctcaggtctttggcccgggagcgagaaggctcactaatgactctcagtttgaactctggaaaactcatgaaagttttaaaataatgtcggtttttttatttttgtttttgtttatttattattattatcttttttttttttttgagacagaatctcgctctgtcacccaggctggagtgcagtggcatgatctcggcttactgtaacctccgcccccccatgttcaagcaattctcctgtctcagcctcctgagtggctgggattacaggcatgcgccaccatgcctggctaatttttttgtattttttggtagagacagggtttcaccatgttggccaggctggtctcaaactcctgaccttgtgatctgcctgccttggcctcccaaagtgctgggtaagccaccacacctggccttgtttttgtttgtttgtttgtttgtttttgttttgttttgagacagagtctcgctctgtcgcccaggctggagtgcagtggcgctatcttggctcactgcaagctccgcctcccgggttcacgccattctcctacctcggcctcccgagtagctgggactacaggtgtcctgccactacgcccggctaactttttgtagttttagtagagacggggtttcaccgtgttagccgggatggtctcaatctcctgacctcgtgatccgcctgccttggcctcccaaagtgctgggattacaggcgtgaaccactgcgcctggcctgttttgtttttttgagacagggtcttgctctgttgctcaggctggagtatggtggtgtgatcacggctcactgcagccttgacctcccaggctaatgcaatcctcctgtctcagcctcctgagtagctagaactatacgcacatgccaccatgcctggcttttttttttttttttttaagagatgtgattttgccatgtttcccaggctggcctcaatctccaggccttgggtgatctgcctgcctcggcctcccaaagtgctgggatgggattataggcatgagccactgtgcccagccaggaaaaatctgttcaactaaaatcagcacattggacgagatgtgcaatttcaccttaaagataatggcttcctaatctgcagagcttgatcttaacctgtggttagcttttttttttttttttttttttgagacaggttctcactttgtcacccaggctggagtgcagtggtgtggtcacagctccctgcagcctctatctcctgagctcaaaccatcctcccaagtagctgggactataagcacatgccaccacacccagctaatatattttttacatttttatagggatggggtctcactatgttgcccaagctggttttgaacttttggcttcaagtaatccccccaccttggcctcccaaaatgctgggattacaggtatgagccaccaaacacacctggccctgttgttcccacttttttttttttttaggacctgttgtttacaacaatgtcattaacatttttaacgaaagaatgtgtccactggaatgggggctggccagcccattttctgaaaaaaaaaaaaaaaaaaaaaaaaaaaaaaaaaaaatgaggccgggtgtggtggctcacgcctgtaatcccagcactttgggaggctgagacgggcggatcacctgaggtcgggagttcaagaccagcctgaacaacatggagaaaccccatctctactaaaagtacaaaaaaaaaaaaaaaaattagccgggcatggtggcacatgcctgtaatcccagctacttgggaagccgaggcaggagaattgcttgaacctgggaggcagaggttgtggtgaaccgagattatgccattgcactccagcctgggcaacaagcatgaaactcttgtctcaaaaaaaaaaaaaaaaatgacattcaagcaacacttatactaagggtataacattagatattaagaattgaggccaggcacggtgactcacagctataatcccagcactttggggggccgaggcaggcggatcacgaggtcaggagttcgagaccagcctggccaacatggtgaaaccctgtctctaaaaatacaaaaattagctgggcgcagtagtgcgtgcctgtagtcccagctacttgggaggctgaggcaggagaatcacttgaacccgggaagcagaggttgcagtgagccaagatcacaccactgctctccagcctgtgtgacagagtgagattccatctcaaaaaaaaaaaaaaaaaaaaaaaattggccaggcatggtggctcacacctataatcccagcactttgggaggccaaggcgggcagatcacgaggtcaagagtttgagaccagcctggccaacatggtgaaagcctgtctctactaagaatacaaaaattagctgagcatgatggcaggcacctgtaatcccagctacttgggaggctgaggcaggagaattgcttgaacccgggaggtggaggttgcagtgagccaagatcgcgccactgtactccagcctgggcaacagagctaggctcctcaatctataatctgcttttattacccaagttttaaaagtcgtcttttcctcttctatgggcaaatatatattcccataaaaataagccaaaaaatgtttattaaaaatgcaaaacttattttaggtttgttagctgacttgttttaattgactagcttgctaatgaggggctacttcactcgtttggattacccacacttctttagtgtctttctcctctagtgctcttttaagtagcagggttgtgtttcaaaagttttagcatttgagagaaactcaataaatagaatgagttttaaggtggtttgtgctgctcccaactcatgctcatatctgccgtgcttatacctctgactgtgagcatgattggtccacagataaaagttttactgcacacaaagtatgaagaggaggggacatcagggagggtttggaacaaaaggaggaaaggggagaatccaggatttaaagagtggatttaaaaggtgagcaaggtgaaaaagataaaacatgaaaattttaaaggaggcagagatttatgagaagagtaaggtttattgaaaaggaacaaaaggtaaagaaagcagaaagagaaagcaagtccaggaagaatgggcggggtcatggtgattgaatctgtacatgtgctccgcatggctgtgttctggccttgaaggttggctgatgctgccatcagcactttctttgtcagtatctggagtctcacaaagtagcaaaccccacagggttactttcctctctgacagcaatgctgcctagatgtgagtgctcaggttgtggttggggatcaagaacggctagcaaatctaacttggtgatggattctgtgtaacccaggacctggggaaatacaggaactaaaatctgttcttgtgactatttgaattctcaatgcagtcttgcatccctcgttcaactgcttggccagacttccttgtactgggtggggatccctccccactcaagttccacggggtgagcggatgagtggtgtgtgaaagggcacacctcacttaggtctcctttggcaccagggagaggaaacagaggtaaagctgtctctgtctctgcctcagacccatgcctactcctttggcactggtcactcagcagtagaatagtagtatagtagtagacggccctatctgcatagtcacacacctcgggttttgagcattgtgtaatgaccagagtaaactggcctggctgtttgcctctggtccacagctcagatgatcatggtgtacagagcctggtggaacccagttacatctccactgttatttaagggcaatttatttgctcttcctcagagttcccctttacagtctgcaggcaaatatacagatactttagtaaatgtttataggaagacctgctggcagaactggtctcatggctgcagactatgaacagaagttgtttctccactttgggaaattacatacagctaagaataaacttgttcactcagaatagatttttggatcccacacatcctggaaaaaactgtttcttagtgcctgtctgttattgaaaagaggacatctaaggtagagattcaattcatttcaaattttagcttaataaagtaaaaagaaatgatagaggtctttaaggattctgtacactttgaacactggccacagagcttacttggtaagacttggtaccaatgaagttacaggttcattctcaaaaagggtgtcgttctgagagcagagcttagtggaccctgtgagaagtatcaggcctttctacttcaagagactcagagatctcttaggctttatgtcctcccatttgaaagaaatcatcccctaaacgttcccagaggagaggatagggaaggaagaggcaaggagatgtgactggccctagggaacaactgtctgccctcactgtgtacgggacaaccaagtcccaggcctcctcacagcgttttgctgatgaatgttgagagagaacatggcactctacgtgagagggcagcacacactgcactgcccctctcggtaccctgccagctgttcctccccctgaagacacagtgggaggttttatgctggcttgcaaagctgtcaaaattatgctagaagagtgtctagaatcttttctcactcactcactattactgccttttcagaggactgtcctttcttctctgtgtagagcactctatttaagatatgaatattccccaaaatgctttcatagagtttcacagaaaattagaggaagggttaaggctgcacagggctggcccaaccatttgctgtgtggtgaagaatttcagtttcattacctagatattttacacaaattggaaggaatgaaaggcattttgtggtattctgaggaatagaggcttgacgtcaatacagaattttcatcttctttcactatgtctaaaggctagttaacatcaatgtctgttgtcagctgctcccccctacctcccacacacaccacaactggggcctttattagagtaaaaaatatatgagacaagagggtaaaagaatgtaaatgaagccatgcaaatttgttagaaaaacagctttaagtagatggtaatcaacagagggtctgtaatatccctcaaacgggaaagacagtatttatgaacatcaattatttatagattacctcattcactctagaatatcctgaagatattatctacacatttttatttgaaacaaagggaagaccatagtttgttcaaattgctgtcgtgggattaatttcatttgggttagcatctgctctcctccccaaagagtttcccttggctgtggaaatttaacattccaggacaatttagaaaatgctctcttggtttgtgagtcaggagttctgagtttgtgcagtgagcaggtctatgcagacctacccacaaaggctgagggagctgaaaagccaaagaaagaggctgacaaatccagtttctcagaaagaaacatttaataagagcttatgaacagaagtgatgtctaggaggccatgagacagtggatccctgcaccagccctccagaaaatatcctttatatagcaaggttttaggataaaacatgtgcagctagtcacgcttgactttcttgcaaaacttatcactggagcgattggataagcatctttatgaggggttgtctatgctctgggcactacccctttatgagggataatctatgctacaggcattgtttaaagactttgctgcagaacaaaccaccttggtatgcaggagtcaaaccaccagttagcatggtggtttcactccaagatggcatcactcctgccatgcaacaggctgttttcctacagttttaattctatttctgttattgactatgtgaactttgataagacctggtgtttaactttctacttggtaggggcaaaatggtgggagaaggggaatgaaaaaaaaaatctcttactaactgaaaaaatatactgtgaagataaaaaatgtctaacattgtcgtattggcagtgttttaaacatggctgtgccaagtctgagcatgccatgaaggcatgggcaggatgtatgccaggcctgtgataatggtagagatttttaggcactgactatgcttcctgttgtctgaatagacatgggggcaattacagaaaagtggctgagagcccaggacatagaaaataaaggggaggcacagccgcagccgctgtgagttggcattttaccatgtcgggaccctcttgtctttatgaaactagaaggggcccttaggcagctgctgctgcataaaccttaaataatattgaaaagggttgatgtgagaaatgaataggaataatgggactctgataggtctggctagttagaagctcaaggttagtcaattatgtgagctagcaatctattaacttgatgttaaggaggaagacagactttttgctccatgtgggtgaaggctctattaaagagagagccgatgtgggtcaggtgtgggaggtagtaagccactaaagaattgttaatgagacactccttgtgtgggtgaaggctcataaaagctcgctctcctgagctgggatatgttccagcctcaggtagatacgagtgaggctgattttgccatgattagcagagttacttaaaaaggaaaaaaagaaaaatgtggtcttattcttggatctgagtctctgagtttcagctcagctgcagtaaagctctccagggcacgccaaatgctgtgtattcattgaaggttcctgtttgtctcttccagcttctgcctcctgctcctggtacctaatttctgctcctgccttccactttcctcctaatgtgagctcaactttcagctttctcacaggttctcctttccttctgttccctgggctgcttccccctcccacagtgtgtgcctcccctccgtgtgtttgtgatggaggagtgctctgcgtccttcagttcccctttagcagaacagtatccatctcctcttatcccatgtgaagtttctgtctcctgctgtgtctttactgaccagaatgagcacttactctcctacatctatttcaagtgttaaaaaatacagaattccgggccaggcgcagtggctcacacctgtaatcccagcactttgggaggccaaggtgggcagatcacaaggttaggagttagaaaccagcctgaccaacatggtgaaaccccatctctactaaaaatacaaaaattagccgagtgtggtggtgcacgcctgtaatcccagctactcaggaggctgaggcaggagaatcgcttgaacccggaaggtggagcttgcagtgagctgagatcgcgccactgtactccagtctgggtgacagagtgagactctgtctcaaaaaacaaaacaaaacaaaaaaaacaaaaaacgcagaattccctttctgcaactgaaaatgatttttaatctgataaatacatttgtcctacttttacattatgtgaattgtgatttgtacaggctctctccagtagcatccattatactattacaccaaaaatttattctgctttttaatatctctccttttgttgttgttgttttgagacagagtcttgccctgtctccaaggctggagggcagtgatgagatctcagctcacagcaacttctgcttcctgggttcaagtgattcttgtgcctcagcctctctggtagctggaattacaggcgcccgccaccacgcccagctaatgtttgcattttctgtagagacagggtttcaccatgttggccaggctgctctggaacttcgacctcaagtgatccacctgccttggcctcccaaagtgctgggattacaggcctgggccatcgcacctggccagtgtatctcctacctagacaaagacctagtccttttagagaaaacttaattaaaactctgcaaagatatctccatttagcagtgtccatataagaaaaaaagaattctgaactccaaatacgataatgtgttaattacttgcaacaacattcattacaataacatttggttatatttaaatacctcccttatgctaaactaggttgtaacctgtggtcttttgattctttagatgtttctttttaggacattgcccctagaataaagcagagtcctggtaactagccatttccactcagctttgttccttccttcttaaatcccttgggcactacttgggagtttaccactaattttattaaacttccttttatagatttctttattttcattttatgcacattttctgctctcacttcctgcccaaatctacttggaaaaccatttttattttttgctttacctcctagtgaatcatgtggcaagtgaaccaacagtctgaattttttatgggcctgttttgggttttttttttttttttttttttttgagaccaagtctcactctgttgcccaagctggagtgcagtggctcaatctcggctcactgcaacctctgcctcccaggttcaagcgattctcctgcctcagcctcccgagtagctgggactataggcacacgccaccatgcccggctaatttttgtatttttagtagagatggggtttcactatgttggccaggctggtcttgaactcctgacctcgtgatctgcctacctcaacctcccaaagtgtgggattatgggcgtgagacactacacccagcctattttggattttttttactcaaaattctatcttgcccataacctggttcatttcaggcttaactatccaggtcctgggccttgggattaatttgcattacttaccatcatgtgttttctggtgagagcccaggctgatcatggcagcaaaagcacctcctaattgctgatgagagcttcctggccacctaagctgtctcccgcatctactggttgaggtgtttgtgttgggcaagtcaagggttaactcccatacacctagggactttgcattcccatctactccccaccccttagtagccatgtaactatttcttttctttattttttgagatggagtctcactctgtcgcccaggctggagtgcagtggcgccatctcggctcactacaagctctgcctcccgggttcacgccattctcctgcctcagcctcccgagtaactgggattacacgagtgtaccactacgcctgcctaatttttgtatttttactggagacggggtttcaccatgttggccaggctggtctcgaactcctgacctcatgatccgcccacctcggcctcctaaagtgctgggattacaagcatgagccaccgcacctggcccatgtaactatttcttatcatgtgaaagcttataatatttttggagttctggcttttatcagtgctagaataccaactgttttatattctttaggattgagtttatcaggtagaaccactgtgcccatgtttgttccaactttacaaacagttcatgaattcccagtcattaatacattaaccagtgtgtttcccattgcattagtttttctctccattggtttttagaaatattatagaacctatagctttaatgggctatgcttccctctggtgtcctaataaaatactttgtgtctcttataaattgttccacttgtgtgtcagttttgacttgtttaaaaatagtatgtctagttgattgaacaaatcaagattataagcagagcagaataaaaggggctttactgaaatgtctttcctaattcccaaagccaaatgctcttcctctccttgaaatttatcccctttagaatctgtcttgtgtttacttggcacttgaatcaaacttctttcttctgtgtgtgataacattttctcctaatccctgcactcccccccccgaccccttcccccatcccctgctcctaacattttttatgtgggtcgtgacttgtctaagccattctttgtaatccagacgtagctccacctatccttggtggctgctacatttagagcagccacacagtttgggaagggaatatcaagagagcctcttggctttaaagagtcagctgatagaattgtagcaggtttagtgctccatgagaattgactgaccagctaagggagcccttagacaaagtaaattctagggtccatctcaagacagtgctaactcatcgctgcccatgctaaagttgtctttttgtttttcctagaagtttcaggcacctgcaagagagacctgcgtggaatgtcagaagacagtctatccaatggagcgtctcttggccaaccagcaggtgtttcacatcagctgcttccgttgctcctattgcaacaacaaactcaggtaagtcagcccaaaacaagccatctgtctataactggaactctagagggagtctttggcttttagagcactggtgctaaaagctactgtgctaatgatattctgttgaaggctcttgaataaagtaaaaagcatcatttagtgacaagtctttcataccaaataatgatggtgtttggaacttcttggtgtattgatatgttaatttacatgttaggaccgaagcttaaataatatgagttgcaggtaaacccccctgtgacctaatttaatagaatgttttcccttggtatcacagaatcacaaagttaagaaatctcaagaggttacttgtttaagcccttacttgtcttaaccactgtataaatgataataatggcaataataatagcccctggagagcatgtctttttctctatgttgcctcactttatttctgagaaaatagttgttacatatcatttcttccaagtaactcaaagtgcaaatataaatgtgacaaatcggggaaacattccaaattaactcattttaatcatagagtcttacagaaggaagtaaccaagatgtcactttctccagctttcctttctgagcaatccttcctaaaatactcttgaaagatgttttggcatctgtgtgacatttctagctattagatagctctagctagacagcttctccaaacatgcagccaaagtgtacctcagtcacttccactcattagttcttctgctgcccactgtgttaatttttttctccaaagcacctttttttttttttttttttttggatacagagtctcactctgttgcccagggtggagtgcagtggcgtgatctcagctcactgcaacctctacctcctgagttcaagcgattctcctgcctcagcctcccaagtagctgggactacaggcgcccgccaccacacccagctaattttttgtatttttagtagagaaggggtttcaccatgttagccaggatggtcttgatctcctgacctcgtgatccacccgcctcggcctcccaaagtgctgagattataggtgtgagccactgtgcctggcttaaagcaccttatttcttttgtggaagtgctgccgttttataccccctttaacatttgtcactcttcagaatggttcgtaacttaagggaaaaaactttaaaaagataaaacttatcatcctgcaagagacaccaaatctcctaaaggcttgtctaggactgacattagggaaaaactacctcctgtcaactcctcaccattcttctattaatcaagcttatatctaggtgtggatataaggatcacacctgtaatcctagcattttgggagtgcccaggtaggaggatcacttgatgccagaagttcaagactagcctgggtaacatagagagaccccatctggtttttctttttgagatggagtctcactctgttgcccaggctggagtgcagtggtgtgatcctggctcactgcaacctttgtctcccaggttcaagcgattctcatgcctcagtctcctgagtagctgggattacaggcgggcaccaccacgcccagctaatttctttctttttttttttttttccggagatggagtcttgctctgtcgcccaggctggagtgcagtgggatgatgtcagctcactgcaacctccacctcccaggttcaagcaattctcctgcctcagcctcccgagtggttgggactacaggcgtgtgcaacatgcctggctaatttttgtatttttcatagagatgaggtttcaccatgttagccacgctggtcttgaactcctgacctcagtcagtctgccctcctcggcctcccaaagtgctgggattacaggtgtgagcaaccacgcctggccaatttttgtatttcttagtagagatggggtttcaccatgttggtcaggctggtctcaaacttctgacctcaagtgatctgcccacctcggcctcccaaagtgctgggactgcacctggccggagatcccatctctatgaaaaatttggggaggctgagactgaggctggaggatcacttgagccctggaggtcaaggctgcagtgagctatgatcataccattgcactccagcctgggtgacagagcaagacctccactcaaaaaaaaaaacaacaaaaaatggctgggtgcagttgctcatgcctgtaatcccagcactttgggaggccgaggtgggcagatcacgaggtcaggagattgagaccatcctggctaacaaggtgaaaccccgtctctactaaaaatacaaaatattagtcaggtgtggtggcgagtgcctgtagtcccagctactcgggaggctgaggcaggagaatggcgtgaacctgggaggcggagcttgcagtgagctgagatcgtgtcactgcactccagcctgggtgacagagcgagactctgtctcaaaaaaaaacaaaaatggctgggcgtggtggctcacgcctgtaatcccagccctttgggaggccgaggcgggcagatcacgaggtcaagagatcgagactatcctggccaacatggtgaaaccccgtctctactaaaaatacaaaaatttgccgtgcatggtggcacacacctgtagtcccaactactcaggaggctgaggtaggagaatcgcttgaacccaggaggcagaggttgcagtgagctgagatcatgccactgcactccagcctggcgacagagcgagactctaacaaaacaaaacaatacaaaaattagccaggcgtggtggcgcactcctgtaatcccagctactcaggaggctgaggcaggagaattgcttaaacttgggaggcggaggttgcagtgagccaagattgtgcaactgcactccagcctgggcgacagagcgagattctctcaaaaaaagaaaagaaaaagaaaaaaaaaatatatatatatatatgtatttatataccgttaagaatagagttaattcaagcacaaaagcttgatgatggctacccagaaacactgactccaaatgaatggggtcagcattccaaagtggagaaagttagtttcacttacacagaaattttagcaaagattatgacatttttcatataagaccagtgcatataccacagtgatttgattgggtacagattggtacattccaaggaagattatcactcgcaaagaagggatagtgatctgagggggtcttatctctggtgccctttggtcttcataatttatagtgaaaagaaagagttgcagctacatgctgtgtgacccaggttgcatagccacattcctctcaaggctcagaatgatttaaagtttctattactgttggtttttttttctttttttttttttttaagacagtctcgctctatcacagtggcacaatctcagctcactgcaacctctgcctcccgggttcaagtgattctcccacttcagcttcccaagtagctgagactacaggcatgtgccaccacacccagctaatttttaaattttttgtagagatgaattctcactatgttggccgggctggtctcaaactcctgggctcaagcgatcctctcaccctggcctcccaaagcgctgggattacaggcatgagccactgcacccaacccgtgctttgtgttatgataagaaaacaaatgtgctaaaatgggggtaaggaattcctggtcactgaagggcttttaaagatctttttcttacttggcatcttctgaaaatactggaattgccagattttagcctcctggtataagtgagaatgtgaagatttgctaagtttatgctttttttcttttaatgacagtctaggaacatatgcatctttacatggaagaatctattgtaagcctcacttcaatcaactctttaaatctaagggcaactatgatgaaggctttgggcacagaccacacaaggatctatgggcaagcaaaaatgaaaacgaagagattttggagagaccagcccagcttgcaaatgcaagggagacccctcacagcccaggggtagaagatgcccctattgctaaggtgggtgtcctggctgcaagtatggaagccaaggcctcctctcagcaggagaaggaagacaagccagctgaaaccaagaagctgaggatcgcctggccaccccccactgaacttggaagttcaggaagtgccttggaggaagggatcaaaatgtcaaagcccaaatggcctcctgaagacgaaatcagcaagcccgaagttcctgaggatgtcgatctagatctgaagaagctaagacgatcttcttcactgaaggaaagaagccgcccattcactgtagcagcttcatttcaaagcacctctgtcaagagcccaaaaactgtgtccccacctatcaggaaaggctggagcatgtcagagcagagtgaagagtctgtgggtggaagagttgcagaaaggaaacaagtggaaaatgccaaggcttctaagaagaatgggaatgtgggaaaaacaacctggcaaaacaaagaatctaaaggagagacagggaagagaagtaaggaaggtcatagtttggagatggagaatgagaatcttgtagaaaatggtgcagactccgatgaagatgataacagcttcctcaaacaacaatctccacaagaacccaagtctctgaattggtcgagttttgtagacaacacctttgctgaagaattcactactcagaatcagaaatcccaggatgtggaactctgggagggagaagtggtcaaagagctctctgtggaagaacagataaagagaaatcggtattatgatgaggatgaggatgaagagtgacaaattgcaatgatgctgggccttaaattcatgttagtgttagcgagccactgccctttgtcaaaatgtgatgcacataagcaggtatcccagcatgaaatgtaatttacttggaagtaactttggaaaagaattccttcttaaaatcaaaaacaaaacaaaaaaacacaaaaaacacattctaaatactagagataactttacttaaattcttcattttagcagtgatgatatgcataagtgctgtaaggcttgtaactggggaaatattccacctgataatagcccagattctactgtattcccaaaaggcaatattaaggtagacagatgattagtagtatattgttacacactattttggaattagagaacatacagaaggaatttaggggcttaaacattacgactgaatgcactttagtataaagggcacagtttgtatatttttaaatgaataccaatttaattttttagtatttacctgttaagagattatttagtctttaaattttttaggttaattttcttgctgtgatatatatgaggaatttactactttatgtcctgctctctaaactacatcctgaactcgacgtcctgaggtataatacaacagagcactttttgaggcaattgaaaaaccaacctacactcttcggtgcttagagagatctgctgtctcccaaataagcttttgtatctgccagtgaatttactgtactccaaatgattgctttcttttctggtgatatctgtgcttctcataattactgaaagctgcaatattttagtaataccttcgggatcactgtcccccatcttccgtgttagagcaaagtgaagagtttaaaggaggaagaagaaagaactgtcttacaccacttgagctcagacctctaaaccctgtatttcccttatgatgtcccctttttgagacactaatttttaaatacttactagctctgaaatatattgatttttatcacagtattctcagggtgaaattaaaccaactataggcctttttcttgggatgattttctagtcttaaggtttggggacattataaacttgagtacatttgttgtacacagttgatattccaaattgtatggatgggagggagaggtgtcttaagctgtaggcttttctttgtactgcatttatagagatttagctttaatattttttagagatgtaaaacattctgctttcttagtcttacctagtctgaaacatttttattcaataaagattttaattaaaatttgaa

SEQ ID NO: 773 - DNA, 8632 bp, Homo sapiens
aggagcgtttttggagaaagctgcactctgttgagctccagggcgcagtggagggagggagtgaaggagctctctgtacccaaggaaagtgcagctgagactcagacaaggtctgtgagttgggggaatcctgttttcagcttaggtctgcttttggtctcagagatgtgtgaagtttaaacaaaaggcaaggggttttggagtctttgtaagactggacaggggtggggcagggatgtagagaaaaatgatggccaagatggtgaccttcatcttgctttctttagattacaatgaaccaactcagcttcctgctgtttctcatagcgaccaccagaggatggagtacaggtgagtcacgctgctagggacagcagttccttcagctggatgacttccgggatcctggtctctcccaggacacagagcatgtccttgagatgcacagcggctggcttgcatgtagactgagtgccgatttctggtctctggcggaatctggcctgtggcagtgaaggtattgcttgaggcatgtcctgggtccaggctctgtgcttttgtgtggccctgagggggctgtggcaagaactgtgtcaccttccagccactgcccactcctgtggccttggctgtgggatttccatgggaactacatggtctgctttgtgcctggagaatgttctctccacagttttcctctctacaacaagaataacaatgacattttaaaatttatatttttcttcacgtctaaaaattttttttttaaagaaaaggctgtttcgaaatatcttcttacttcatctttgcaaaagcactgtttattaactgtgttttaggtatgaggaaactgaggtcagtcacctctgacctcacagctttcccctagactgttcgaatagtttgcagactttttggagtagagattagtctcaccactccctacttcacaccccatgtttcagccatattaagcagcttgtagttctacagctggactacgctgtatttttttttttttctctaggcctttggatatgctgttttccctgccttggattggcttcctactgataaatcatgtttattctctcagaataagctaagatgtcacctggactggaaggtcttctgtgactaagacatgagacaacccgtcttgccttcttctcccaggcaactgccccgcttactgtctggcgtttccattctccactgttacctcagagtctttcttttgttctcttgagtttgcctttcttctaccatttattcttgtcaatacaattttctgttgacttgttagcaattccctctagaggcaagctcttgctggggaactttaatgtctttgattactcagtgcttagggcaggacccagcacaaggacaggtcttgtggcgggaggcagactttaagcctgtgctggctgtcaggtcggatgggctgagtggatatgatgccgatgggctgagtggatgtgacactgatgggctgagtggatatgacactggctgtctcaggccttaccacccgggcagcgaggttctgctacagtggtggaatgagcgtgggactagtgataggagagggtaggttttgtgtcaaaccgggaatgagaataaaccctgtgtattccctagatgaggctaatacttacttcaaggaatggacctgttcttcgtctccatctctgcccagaagctgcaaggaaatcaaagacgaatgtcctagtgcatttggtgagtgatgaaacattcaaacagagctcagtcagggtatcaggattgtgtcttctgggagtctttttgtcttttagttaaaaaattatggtaaagtatatgtatattataatttacataagatttgccattttaagcaacattaagtgtgcaattcagtggcattaattaccttcaaggttgtgcaaccatcacagctatccatatgcagaactttttcagtgccccaaacagaaactctgtacttaataacatggaggggccgggtgcggtggctcaggcctgtaatcccagcactttaggaggctgagaggggtggatcagttgaggccaggagtttgaaaccagcttggctaacatggtggggccctgtctctactaaaatacaaaaatcaattgggtgtggagtacatgtttgtaattccagctacttgggaggctgaggtgggaggatcgcttgaactcaggaggcagaggttgcagtgggccaagatagtgccacttcactccagcctgggcaacagagtgagactccatctcaaaaacaaaaacaaaaacaaaacaaaacaaaaaataacatggagttattaagcaataactctcttccctcagtctctggtagctgcattttactttctatctccatgaatttgcctagtgtagttacctcatgtaattggagtcatatggtatttgtcctttggtgtctggcttatttcacttagcacagtgttttgagggtttgtccatgctgtagcatggatatttcattcccttttatccactgcagatacatatatgcacacacaccatgttttgtttattcattcacctgttggtgaatatttgaattgtttcttctatttggctcttgtgactaatgctgcaatgaacactggtgtaaaagcatcagcttgaggccctgttttcaattcttttggggatagacctgcagtggaattgctgggtcatacaataattccatgtttaactttatgaaaaatgtcactgggattttatacaattctatgttctgcctcagttacaggagcatgatcttctgaactcagggaggccccagtacccctgggagcacttagtgatgtgagtcaggacaggagcctttaggccatgtctctggttcctagggcctttcttgtcatggggctgaaatgaaccctcagctctcagacagggaggctctgggctggttctctctacagatggcctgtattttctccgcactgagaatggtgttatctaccagaccttctgtgacatgacctctgggggtggcggctggaccctggtggccagcgtgcacgagaatgacatgcgtgggaagtgcacggtgggcgatcgctggtccagtcagcagggcagcaaagcagtctacccagagggggacggcaactgggccaactacaacacctttggatctgcagaggcggccacgagcgatgactacaaggttggtgccacttcttacccactcgggtgagggtgaggagtggagtgtggctggccacaagcctgcaggagggatggctggaaggtaggggtgtgggatgggctggagaagaagagagaaatacttatatctttttttttttttttttttttcttgagacggagtcttactctgttgcccaggttggagtgcagtggtgtgatctcggctcatagcaaccacggcctcctgggttcaagtgatcctctgcctcaaaagtagctgggactacaagcgcccactaccatactcagcgaatttttgtacttttagtagagatggggtttcaccatgttggccaggctcgtctcgaactcctgacctcaagtgacctgcccgccttggtctcccaaagtgctgggattataggcatgagccaccacacccagccaatttacactttgaatcacaacttcctcctaacaaggctgttagggccctgggtgtggtgggatcatcggctgggagtggggtgtctgagtatggttggccatctgctcatctggagtccagagctctcacagtccagctgaagttgcatgtgtggaccttctgcctcctgggacctcctggcccagtcaggctcagtgtctgttgctttccagaaccctggctactacgacatccaggccaaggacctgggcatctggcacgtgcccaataagtcccccatgcagcactggagaaacagctccctgctgaggtaccgcacggacactggcttcctccagacactgggacataatctgtttggcatctaccaggtacagaaggctgctggctgggactggttttcatgggtgtacagagaagcaagtgttagaggttgggcaggagtcattttttaatgggtctgtctcccatgttcttctaacccagatttgctgatggcttctgttgcttctcttaggaattctaagccaggcaagagaagggacctattggagaggacagctggggcaggaagagtgtggatgggtcagggagaaggagagagagataatgaagtggtccaggctgccgcagaagcacagctctcgcctaactggcagcagtgtcatggaaagattcttattttgactggttttgaagtaatctcagttactgagaaagcattgtttctcctctatgaatggcagcatcccaggagatgctggtaatggcaaagctattgtctttactccatgactttttctgtgttctttgtagaaatatccagtgaaatatggagaaggaaagtgttggactgacaacggcccggtgatccctgtggtctatgattttggcgacgcccagaaaacagcatcttattactcaccctatggccagcgtgagtctttaatgatcctctgaactcctggtaggaaagggaatacattcaactatgctaggtaacagttatgcatcggactgaagcttggttctctcctgtaatgttccctatattgccccacttgatttgcatggctgcctttgagatctgaactttattaacctcattttaggaaactgaagcactgagaggtttagaaacttgtgaagatcacaaggcatatgtggaagaatcagcaactggggtgaggaaatttggctccagactttttttttttttgagatggagttttgctgttgttgcccaggctggagtgcaatggcgcagtctcagctcactgcaacttgtgcctcccaggttcaaatgattctcctgtctcagcctaccaagtagctgggattacaggtgcccaccaccacgcccagctgatttttgtatttttagtagagatgtgatttcaccatgttggccaggctggtctccaactcctgacctttggcgatccgcccccttcggctcccaaagtgttgggattacaggtgtgagccaccacgcccggccaggctccagactccagactctttactcctaacaacccactctcagccctgcaggagcttgttaggaccaggccaggtccatgtgcacagaacaaccaaaaaaatggcgagacttttttttctattgtgagtttattttgtgtgaagccaaagttggtagcatagtacgctccgcagaggctgagcatatattatagaactcaaagctgttattatttacattttggagttgagattttaaaataaaggagaaaagaaaaatgtaaacaggaacagagtgaatacatctgttaatttctgcaactcagcccttggagatgttcagtggtgatcttcctgcagagttgaatttctcttcacaagcctctggcagatgaggagccctctctgaggaccagctcttcatctctggggttgggaaaaggtccctcttagctaagtttgaggccaggatgtagcagccattggccacaggggtgctgggctccaccagtacagctggagtgttgggctgtagcctgagctttggcatcgagagcctctgggctggcctaaggaaagcaatttctagcatcttccttgaatgctgttttctgcctcttgttttcaggggaattcactgcgggatttgttcagttcagggtatttaataacgagagagcagccaacgccttgtgtgctggaatgagggtcaccggatgtaacactgagcacgtgagtctctgtggggactgcagggacctgtgagtaaggtcgagtttgtccgtgtgtgttggtatgtgtgagtgtgttgagtgtggtatgactggggtgtgtgtgtacgtgtgtgggagtgtgaccttctcttgctcattgctgagcttcaggggccagggccatgggaacttttgtccaggtatacatatcctgtcactttgaagaccaaaatcaaggggtgaggcttcaaaagaaccattactgggtgttcagcctttgtgagaaaacactcaatcgcttggagctggggtgaggcttgtgtgctgaaacattgtgtagaagtctttagagctgagattccttgagaaacacaggtgttgttttccttcatctgaggtttatatttcagagaaaacctggacctccccaaccctagccatggtttgcctagatacacactgcactggggagttgctgggacagtcctggacatcaccttctagaaacctcactcaggccatcctttttgtggttgaaatgttaaggctcaggaatcctgaatggtgggattgacaaattccaaagattttaaatagaataccagttgtaattagtccattctttcactgctataaagaaatactggccaggcatggtggctcccgcctgtaatcccagtattttgcgaggcaaggcaggtggatctcttgagttcaggagtttgagaccagcctgggaaaaatggcaaaacttgtctttacaaaaaatacaaaaattagccgagtgtggtggtgcatgcctgtggtctcagctacttgggaggctgaggtgggaggatctgcttaagcctgggaggtggaggttgcagtgagccaagatcacaccactgcactccaacctgggtgacagagtgagaccctgtctcaataaaaaaaaaaaaaaagaaagaaaaagaaatatctgagactgggtaatttataaagaaacgaggtttaattggctcatggttctgcaggctgtaccgtaagtatagcggcttcggcttctgggaaagcctcaggaaacttccaatcatggcagaaggcaaaaaaggagtgaggtgtctcccatggcaggagcaggagcaaaggcaggggaggcgttacacactttttttttttgagacagagttttgctcttgttgcccaggctgaagtgcagtggcacgatctaggctcgccacaacttctgcctctcaggtttaagcgattatcctgcctcagcctcccaagtagctgggtttacaggcataagccaccacactgggctaattttgtagttttagtagagatggggtttctccatgttggtcaggctggtcttgaactcctgacctcaagtgatctacccgcctcagcttcccatagtgctaggattacaggcatgaacctccatgcctggctggtgctgcatacttttaaatgtccagatctcatgagaagtcactcactatcatgaggacggcatcaaggagctggtggtaaaatcattcatgtgaaaccacccccatgatccaatcacctcccacaaggccccacccccaacactggggattacaattcgacatgagattttgtggggacccaggtccaaaccatgtcaccagttgaatacagaggatgggcaaggaagtatagaataacatggttctcatttgggtgagggagtgtcatttatgaagtcagagtgtctggatgatgaataggttctgggtcaatgagggatataattaactctattttggtcatttggagcttgaggttcctgtgtagagatccaagctggactttgaggtcttcagcacaagaagcatctcaacaggagatggagattttggggccatcagtgaatttttagtaattgaggccacagtggtcatgcagtttataagggagagggagataggtcctccactagggagcagcacttagaggatttatgaaagaagagaacaggcaggggctctgagcatgaatattcagaaaagttgaaaggaagtcaagacaataatgtcactaaagctaaaggaagagagtttttttttttttcttttgagacagggtcttactctgtcacccaggctgcagtacaatggcgtgatctaagctcaccgcaacctccaccttccaggttcaagcaattctcctgcctcagcctcctgagtagtgggactacaggtgcttgccaccatacctggctaatttttgtattttttgtagagatgtggtttcaccatgttggccaggctggtctcgaacccctggcctcaagtgatccaccctcttcggcctcccagactgctgggattacaggtgtgagccaaggaagagaggtttttatgggaagaatagatcaacactgtcaatggagagtctgatgaggaccaaagaaatcactggattcagctgttaagatggcattggcctcactggcagatctctcattactgcctcttcctctctttgtttcccagcactgcattggtggaggaggatactttccagaggccagtccccagcagtgtggagatttttctggttttgattggagtggatatggaactcatgttggttacagcagcagccgtgagataactgaggcagctgtgcttctattctatcgttgagagttttgtgggagggaacccagacctctcctcccaaccatgagatcccaaggatggagaacaacttacccagtagctagaatgttaatggcagaagagaaaacaataaatcatattgactcaag

SEQ ID NO: 774 - DNA, 62352 bp, Homo sapiens
ccgctgaggccgcggcgcccgccagcctgtcccgcgccatggccccgcgcgcccggcggcgccgcccgctgttcgcgctgctgctgctctgcgcgctgctcgcccggctgcaggtaaggagcgcccgcgcctgccgggccgcgcggcccgacgcctcctcgggagccccgggaagggccggggccggcggcatcctggctcctccgccttccgagaggagccggagttttggggagcggaggccgtgggaagctggggaggcgcttccagagttggacggcggagggcgggaaagggcaagcggagggaaactggggcgcagaaggagcaggttggcgggaccgcaacacccgaaacgggctcttccaaaagcccctcttagccgcaggctttgatgctgtcattttctccaaatgcttcttgagcacctactaagcgcttgcgccgggcggtgccgcgggagacagcgccgtgggcacctcacttgcggcagataaccgttcccgatacgatttctcccgggtggcctccgtcccaaatttccacccggaaagagacatgattccctccgtccctgaactgcgggcttgcctttgcctcccctgagccccttcggggacacccctgccagctcgcctggaggccccgcacggcggggagagactgcgcgcgcgccccggggatgctggacttgaccctcgcagacccgagtggcttcccggtcctctcggaacaggtttctcagtacagttagcaagcgaatgcagccaggcacggactttctgcctcgtggaggagggccgcagagggaagcacacccagcacaacaaacgctttaaaaatcgttgatacgaacttgaaagctctcacagggaagggcgagtggtggttttcttggtttcggctgggtcagatttcccctctgttaacactaggttaggctgctgccgtccctccgcagccgggcacggaacccggagaggcgtggggagggacgcatggagaatcgtgtttgggtgagaagagaggggaaaagccttgacagaaataatgtgggtgcactgaaggctgaagcaaaagattctagggaagattcattcccaattgtatgggtctgtcagtatggttgagggaaacgaaggcggaaaagtctaaaggattttttcattttaagcacttcaggtgttgcttaattaagtgttcaacaggttgaacggggtgctaccttatttgaaccaaaggaccagggtttcagcgaacagctagccacctaagaaaaacctgcctgaccacgcagttgcaaaattatctctcactgctgtcgcaaaatgacatattcatatgtgcataaaaggcgttcggttctaatatgaacaacaaatgctatcaaaataagtttatttttcagggagacctttcaacaaatgctgtttcccgtctttttgcctttaagcccctttcattatgcatgtttaaaaatgtaaacttttgcattggtcatttccaattctaggggagcgaaccttctaggaaccttatgaattccttggctgggccacgaattcaattgatataagacagactaacaggagaaaaactgtacttaattacatacataggcacaggactcctacaaaataagagacttgaggaagggtcagatgattgaagctcattatagcatccataggggcttctgcagggtgctgcaaaacagattttggggcgggtttggggaggaagcatatggtgagtaaaggacatcttgtcaggcacataaaagattctcaggcaataaaaatggtctctgaccagcccttcggagaataggtgagagcctgtgtgggctggtgtcaacctcctgtctcctctcctgtaatcggagttaatcttctctgggtgagaatcttctctgggtgagaagattcccacggcggagatttgagacatttgagttcgttttggaggatctttctttgggcagagttcagagaaacctctgcccgtggccactaccacctgccctgagttcaaaataatcagcacaccatagtggcatattttggggtggcatttcctgaactctttcacaatcaagtgacattggaatgcttttctgcttattttacttggtgcccaaccttcccagtagaaatgcattttctctcaaaggtgagactagatgcagccttaaaataatatttcctagagatactgtggttatctaggaaaaagctctctctgtattcaatgactgcttgtttggccagcctattccattagctcaaaatttaggaatggcattgacagttcattgaagatgttaatgatcaaacaccaggcaagacttcaggaactgcctagtgggtaaattggttttgcaaaatagttggcataaatggcttccagaaagtgccttatctgtagggatcgtatttagtttcatttttattatattaaataggttcaaacttacctgaaaggctataagttttgccctttaaaacatttctatgattatatctctgcctgcttgtatttgtgagggaattcattttcagatagaataaaactatttgcctacagataaaaacattttgaatttttatgtagctagtcctgctgtttattccaggtaacaaaatatagatgcacactgttttcattaaggtaatggattgtacacggtcatgtttatctggggttataagatgcaagagcaggtgcgtgcatacgcaggacaacagacattggtggtgtcaaacactgtgctaatgaggaataaggggaaggcgcatgggtcacagtctagtggagagcgccagatgggaaaagctgtgatgataagagagcagcaaatgataagaaaagtacagagggtggcagaggaagggagagagggaggaggggagggagagagggagggaggaccgctggaggaatccctaaggacttcgggatgaaggggtttcccaagtggtcttggaaagatgtgtgggaaaccagaggtcagggaagaaatgattctaggaggtgggaagaaagctccctatgttgggaggatggtgtgaatgctttagacctaaaagaatcttacagaaagaaagaaaaaaaaaaacaaccatatatttttatgaccttgcagatagcacaaatcacctaattcaggaaacccccaccaaacaaattgggcattgaacttttatagttttgaggtaactcttggatggcccttactgaggtggtaaagtcgactaatcagaagcaggccacagggccctggagcgcccatggggagacccctccgaagaaatcccccagggtgtgactctgggtcatagggtgggtgggtgctctgtgccacctttcctcctgccccccatcccatccgagaggggagacatggatatatgcagtcatgccttgtttggggagcacagacacagatctgtgggcttacagttcattttgctgagaaatatttcaaatgcctcccctgttatttcctttctaccacttccccctaaaatggcaaacctgtaataggaacatactccctgtgttgataaggaaatagcttgctttttcagttatctaccagaacttcttacatcaggaaaactgaaacaataaaaatgtgcctttggaggtcaataaatcagtgttttatgaggacatgaaaaggggagttccaaagcagggcctcctctgcaaagagtgttgttttaagaaggggtagtgtggacttcatctgccatgtcaatattaaaatttcccccattgtattttcctatttttgaagttcatggaaaaaaaaatagtgtttttcccacatgctgtatccagtggtctctaggaatgttgtctaggccattttttggtttgttttttgtttttttggctgatgtgagtctgcagcccatcctgatggtacgcaactgtccaggtggttcactccctagggcatctgccccctggccaggtggcccatggcctgactgctgtctcctcacagcatcctggccttagtccacagggaagcacacctgcctctgagcacacaggctgctgactccagctcagtgcaccccaggactggcatgggtaggattctgcccagcaggtgatttttcctctgagtaccctttcattctctgcccggattgtgggacggcctttctgtgtatttccctctagttgcagtgtggggctttctatggtgtccactgctggaaacacagtttaagttcagctcaccctttgtgccccaaaacgctaagcttgaaagaaccaagaaggagccgtgggtttcagcaaaatagccttgatccctctgaagttcttagtgaacttttgaggtttaaaaccgagtgggtgtggagcaagattacgcacagccccatatctctgtcctgattctgagagacactctatttcctgcctgcgagaccaacctggcagcgctccccaggcaggctgcctgtctgcctgggtcaccagaagctccttgtcagagggctgactggtgctgctgttctcactgtgtcacgttccagtcgcagtgtgctctcacgccaagaagcccaaagcagccccagtcagcagtgggaagtacattctttagggccgtgtgatgatgactttatatgtgtgtttgttttgtgagccaccgtcgactttcagcctttgagtgctttgggtcactgcttgcaggccacagcattcgataatgagaaaataaacctgaatttgtgttcaatgcattcagtgactgcaacaaatggagtacccacaacctgtagcacactctgcagtggactgaggaaacagagaccaagggccacagctcctgtcttcaggagattggcagtccaggtgtgtgcagatgattaaaagacagcaggatccggtgttctggggagggttttcaacttgtcgtgggcacacaggataaggagtgccttcacctgaaagtgtcagagaggacttcccatccttcctgtgtggtcacatgtgtctaaagctctgcagaccgcatgagagaacagctcttaggctgggggttccagaatgaccagtgctttgtctggcggtgagaacagcagggactcgcatcagagtggagtgtttgcagggaaccgaaggaaggacaggattcctggactcaggggtgtggggagagaggaaggcaaaagccagcactcaaaggctttaggtacaagcaaatagttcagatttaatattgagctgtgagctggagagggccatgatcagttttgtgtattaggggaagagtgtccaggggcgggccggagggggccagtaaggagcctactgccttggtttgggaaagggcctgaatcaggtcagggcagtggcgagagaaggagaatctgagtacaggggcgatttcagagccagtggggctgtgcaggggcagaaggtgcaggggcaaaggacggatgtggctggttattagaaaaaaaaagacatggcaggcaggtctgagtgcaatggtgtttacaaccaattaatcacaaccagttaacagatttatttgttccttctccactcccactgcttcacttaactagtaaaaaaataaaataaggccgggtgtggtggctcacgcctgcaatcccagcactttgggaggccaaggtggcagatcatgaggtcaggagtttgagaccagcccgaccaacatggtgaaaccccgtctctactaaaaataaaaaaattagcccggcgtgagggtacatgcctgtaatcccagctgctcgggaggctgaggcaggagaatcgcttgtatccaggaggtggaggttacagtgaaccgagtggcaccactgcactccagcctgggtgacagagcgagactccatcccaaagtaaataaataaataaatagtaaataaataaataaataaataagacacggcagctgtcaggacaaaaaagctggctgtttgggttatatttttcactttattaaggaaattgctgtcttagtccaaatcaaaatgttgttctggttcaagtgaagaagtgttgttgtttttcccaaacaaaaaagaaggattacgtttaggctcttgaatctccccttttttgggttctcttattgggaggcagagacaaagttcattagaccctgtagaggcaaacatggtaaaagccccgtggcattgtgctgtgcagggaacttgcaggctctgacatctagagagccattgccagacctagagatgtcttggaatgagaagttcagcgtagagacagagctcttaacacacactgaagagagataaacagccagtgatccccagagagtcacatcagagcagaggcaggtgtgacctgacctgtggtcttcccacactggcctcaaatatgtcacctaaccccaaaagaagcagtgtttatgttggaccaagagctgcgcaaaaactgtttgcttgcatgatacacattttcctggcacattgccgctgcctaagatgagcgtttcccttcctctgtgtccagtgcctcttagacttccccatacccccaaaaaatcctgacccagcaggtgacacggaggcccgtctggcaccagcaaagggacagagctgccagatttccaagtatcaggaagacctgactgtaaaaaccacccttttagttcatcaaagtaataataacttattacatttcctgttgagagtgttgagagtacaagagccacttcctcaagctatcagaaatttgaagactttccatgaaaaatgaggaagaaaaactctgtttagctcttggtgaatgtgatggctaagctgggcaatggggaaagattgtgtggcattgccagaaatcctactggcaccactgtgttggctggtttggggttcgcatcacatcccacagatgggaaatggaccacttccctaaagtattgactttttaaaaatatgtattacttacctaatgcagttagcacctaacttaatagtgtatcacgtagtagcacaaacagctggcaagttcatagccagtaaaagagacgtttaaaggcccctgtcttctctcaacttcatagtcagatatacaagcaggatcacatctaacactttcatggtaattgagaatcaattccatttttaaagcttagtcgagattattcacttctgcccttgctaacccgtttccttgttgaataattcctaatatcaggaacttccctctaacagacctaaatctaacatgtcacaatttgaccccatttcctcaaatttgttctttaatggggtaaaaaccagttggtcaatgtcttctttattttaatatttctattgttgaagattgttagcccacaacttccccttccccagggttattcattccagttcctttaacctctttgtaaacttttttttttcttttcaattcaacgagatactttttttggatttactggcaaaaaagccaacaaccccaaaccaaacaaaacccaccaagtattttgggaacatcagactcaggacgttgctgcctctgacttcagagaggctgagatctgatggggaaggtcggatgtcccattcttcgttcccacggagccccacaggaggaacacatgagatgcctctaggacacaggcatgggaaggatgagttccgagtggagaatcgggcagggggtgtttgatctggtcctggaaggatgggtgtgattctgagaggaaaagagagctggagggagaagggcagaggtggtgacaggcatgagaaaatcatgtcccgccctgatgtgtggagcccaggactgatgacaggtaccggggaaggataaagccagctgggaaagtcctggaggcctggatcacaaagggcttgcgaataaacctccagaactgggactctgccctgaagccaggggttctccaactgtggggtctgggcccagcatcagtctcccccgggaactcgttagaaatgcaccttcttatgccccccacctaccgaatcagaaactctgggggtgggggccagcagtctgtggcttcacaacctctccgctgattctgacacatgctcaagtttgagaacagctgctagagaccccgggattccatgaaaaggtttgcactcagctctgacaatattagaagattaatatattacaagtaccggccatctgttgaacccctcctgtgtgccaggcatgtactttacacggattatatctaatgctcactccaccttgctagtaagttgagaaaactgaggcacagagagactgattaacttgcctgagtttgcacagctagtgagtggcagagctggagctcctaccaggcagcgctccagtgactgtggtcttcacccctcaggtaaactgcttgtatagtcaactctgtgatggggtagggagtagagaaagggacctcccagaatggtgggacagaaagctttttggtatttggggacacccatgcaaatgcgtgcccagtctgcatttgtgggggtctgtcttgtctgctcaagtatgtactcactgagggctttctagaacttttttttttttgagaaggagtctcactctgtcgcctaggctggaatgcggtggtgccatcttggctcactgcaacctccgcctcccccattcaagcaattctccctgcctcagcctcccgagtagctgggattacaggtgctcgtcaccatgccaggctaatttttgtatttttagtagagacgggttttcgacatgttggccaggctggtcttgaactcttgacctcaagtgatctgcccgcctcggcctcccaaagtgctgggattgcaggcatgagccaccgcgcctggcctctagaactattcttaagcagaaatggcaatgctgtgtctttaaggctaatccagataaaaggcactccaggcactcttggcacagggtccatgtgccagttgatccctgactcaggaggaaaagaagtgtatgtcttgaatcaccaccacttcctgaagccaaggcagcactggctcgtctatgccccacaccccagagttagactataccgtaccactgtgctgtagccctgggtgtaccgcctcagagggtcgcatctctccacgcgtgttcatcccactcccaccacctgccaggctctgtgtagggtgggaggagggagaaggatggccttggagccccagggcagcagacagtgataggttaaacctttgccctcataagctttcggaagtaggtagttatatttttaaaggtcctttatgtcttagtcttactacaattatagctaatctggggactcttcccttgatgagaataacctgggctcctcttttgacatgtctctaccatggaacaaatcaaaatcattttctattactaactttttttgatcccttaaaagacactttctaagtagtaagagaaaagttcaaataagaaagagggtcagaacacacatggcctctgggtcacggtcagtctcaagcttttacttggagtgagatcaggagacactagcggggtttagggggagaatgacaacatggtgtcactaatgcacagtggccagaaatctagcagcagatccccaaaacctatgacaatggactgtgagatcaagggggcagttaaattcagtgaaaacacagctggaacctctgtcttaaaccttaacctattaacttctgtgggtcacaaggtttaaaagtggaaaattgcccctttctaatgggctgaagtttctgtgctccagttgggtccagttggaggtccctgtgaccaagccactggggtcggaattttttttttttttttgttacccaggctggagtgcagtggcgcgatctcagctcactgaacctcgcttctcgggttcaagcaattctcctgcctcagcctcccaagtagctgggatgacaggtacctaacaccacatttggctaattttttttgtatttttagtagagacagggatttaccatattggccagtttcgaactcctcacctcaggtgatccacctgccttggcctcccaaagtgctgggatcacaggcatgagccaccacgcctggtctgggatccaatttccatgtaaaattgcaaaagaccaagcaccagaaggcataaccagtcatcttaactgtgtggggcagtcctcatgggtaaggggactcaaggtggtgggcacctgcccctctgcacccaaggggtgaggtcacgcagaagaggcctcatgggaggctctccatttcctggcatgagtgacgggcacaaagaggctgaaacagctgtgtctcctgttaggcagccccgtgttcagtccttattagaaaagagagtttcagcccagaaagagattgctaatcttgattttgcaaccctcttccctcagggtatctcggattttgtcccaaatcagtggagtctttccaagggcgtgcttgggagtgtgaatttgattcagtgctagaaggaaactgttacagtcttctgtatagggaagttatgaggttacagtggtctttgagaaaaattatttattaatttatcaagtatttgaatatttgctacatgcctagcactgttccagtctccttatcaccagccatctcagcaagttgattaatctctcttgggaggatgcaggaagggaagggaagccaggcctccaagcacagtgcctggcacgtagtagatatttcactagggccaattcttcctatacccccattcatcaatagataaatagataaaaggtgtccagggatgggagaggtggttctcaatgtctattgtacagtcagagatgactatgcagtgtttggaaataggagaaagtcctggtttttggttttcaataaaatctctagcctgctcctcagagaccggcattgaccttgcctgggagcttgttaggaatgtagtctcaggctctgttccagacccagggaatcagaacctgcattttaataaaattttcaggtgattctgcgcacattggagaagcactggatttcaccctgaaggctgggcagtgaaggaagggagggcagcaggtaaggggaatgcttcctccttccgtcactttggggactcctggcctgagcagttcgtgcagccccagcatggaggcagagcctagagggacgtggcctccagccgggggtgcactctcagaagtgaccacagggcttgttggcttctactacggaaaagaagagaaagcagttcttatctgaaatgaatacaaagttaaagaaaaaaacaaaccccaagaatgacaatgtaaaaaggctttcacactgggagaataaaggggcattcactggagcctgtggaaataggggtgcatcgtaacataaggacaagtcaaagccatcctaattactgtattgaggaaacaaccggccttgcccttggattccaggtagcccagggctgcagactcttcactcttatctctctggaagacaaagacacttgcaattaaagttttgaaacgcaagcttgtttcttcattttcccttgggccatatgttttcttttcaaggagcagagataataaatgcattgtgaggggagtaaggcagagggctgagtaaaaatcaacagaccattgatgggcgcctgagtcagtgctgtgcgctttctttcctttaagaagcacatctggaatcaaggtggtcagagggggaaatgctgatgggcccaataacaagcaactttcaagacggtgtataaagtcaattgtgcagtttgctaaatcagaatggtgaatatgtcaggacttctaatcacagttacctatatttttaagtttttgttttttatcaaacccgacctaagttagattttttttctgtgcatactatatattccaaaaaaagaacttgtgacaaaatggttaatatggcaaatttttatgttatgtgtattttatcacaattaataatatatgttttaaaaatctagtggcaaaggtggtaattcctgcctgctaatgaaaatagcatgaagtgcctagtatttaaacctttatggggtaatggcaatgtccaatatgatcaataccacacaattctgacggtatgggtgtatattaactcacaatgcgtataaattagtaatcagttatgtgaccttataccctacccacctcacactgcacttagtcacacgggctatcttgctgtttctccgtcaagccgtgcatgcttcctccaagggccttggcaaatatgtccacctgtaatcctcctcctggcacgtgctgtacatttggcttgttccctggctttaagcaggactccactcaaatgtcatcttctcaaagaggcttcctgtaatcataccaccaccttacatagattgtttcacttttttcatgacaattgttgcgaccagatttccttatctgtttacttatagttgttcttctcccctggactgtaagccaggactctctcggttgagttctatccactgtatccagaggatctgaaattgtccctggcgcatagtatgtgttcacttaattgggaaataaatgaatgtgtatctgattggtcgactttcaggttgtgaattcagtcagtgttgtcagcagctaaatcaaatcctgtgaacagaactaggcaaaattaaattaccctatgaaaacggacaaaggacttgaatagacatttcttcaaggaagatacacaggtggccaataagcacaagaaaagatgctccacctcattagtcattaggaaaatgcaaactggaaccacaaggagatactacctcacacacatcaggatggctattattttaaaaaccaaaaaccaaacaaaaccagaaaataacatgtgttgttgaagatgtggagaagttggaaccctcatgcagtgctgctgggaatgtgcaatgatgccacccctgcggaaaacagttgaggggtgggtgcctcgaagagctaaacatagaattaacttaggattcctaggtatagaccaaaaagaactgaaaacagggattcagatacttgtgtgccagtgttcattgcaggattattcactgtagccaaaaggtagaaacaacctaggtgtccatcagtggatgaatggataaacaagatatggtctatacatgtggtggaatattatccagccataaaaaggaatggcgttctggtacataatacaatatggatgaaccttggagacattatgctaagcaaaattcgccagacacaaagggaaaaatactgtgtggttccacttacatgaggtatagagagtggtcagactcagagacagacagtagaaaggtggtttccaggagcttgagggagggggaatggggagttactagttaacggttacagagattctatttggggtgatgagaatgttctggaaatagatagtggcaatcgttgctacttattgcccctgaatcatactttaaaatggttaaaatggcaaattttgtatctattttccacaataaaaaatattaaatggccccaaagtttttttaaaaaggcattcaaaggacaggcataaaaagagcctaattcagtgtttggcagtgggagacagccctttctcgcctcccgaaatgagctgcattcctggcctcctgcagattttgccatccagagttgccactttgctgtcggctcctgcctgcacttttcgtctccatctctgtttcctccatgagatcctagcccaggctctgttcttgtctaaaacgagtttgcaccttcttgcgctttctcatcccaacagtctttacaatatgtttcatggtgctgctaaaaaaagaccctcccttccttctacaactcactgactagctgccctttcctggaagccccgaagcagcccccaccttttccttctactgtcagaacatacctgcccagccccccaggctctccgcctgcacctgcccgagtctcccatttgctctgtcctctccctcctctcgaatccttctgtctctgccccgcaacctcaccctccccagcttgtgcacttcctcttgtaagtccttccctatctctgtctgtttccctgcccattcaaagccaaggaagacgtggacaccagtctgaggccagggttgcaattctccttcctcgtccacgatcagggaggatctttccaatgcattagttctggcactgctgtgtggggctctgactggtcacagttttccttcctctctatatgtggctgtgtcctcctttacaaaagctgtgagagggcagagacaggtcctgccttcagtcctacagcaagccaggacctcatgcaggtatgggagagagctcagtgaagatgcctttgacagtgtgatgacagcagaacttcgtaaagagattgatacttcctcctgttaaactctgactacatcaaactctatcttctggagaaaaatcatttttcgagataaaggcgagtgactcaggcaaaggtgaatgactcagactcgctcttacccggtgattaaatgaactcaacagcctctttgcggggaacagtatgtgtgtggggagaggactgattcgttatttgtaattttcagtgagaccagtagaagctgaccagctgtgatgagtgcttttaagttggagttttgaatactttttatcactagatagacattcatagaatgcattttagaatgtcccaaatccctaggccttgtagtcccagctactcaggggctggcatgggaagatggcatgagcccaggaggatcacttgagtatgggaagattgcttgaacccaggaggtcgaggctacagtgagcagtgatcacaccactgcactctagcctaggtgacagaatgagactctgtatcagaaaagagtcccaaatcctttatcattcgttttgggttttctttgaaacagggtctcactctgtcacccaggctggagtgcagtggtgcaatcactgctcactgcagcctcaacctcctaggctcaagcgatcctcctgcctcaacctcctgaatagctgggtccacaggcacacgctaccacacttggataatttttaaagttttatagagacagggtctcaaactcctgagctcaagcagtcctcccacttctgcctccccaaatgctggggttacaggcgtgagtcactgtgctaagcttttttttttttaatcaattataatattgtttgtgacagttatagtttcttcatgatcttctccaataaactagacacatattttcatattgtacaaatcacaaaatgtatgagcctaacttttggcagcagaatttttttttcaagagctatgtgtaaaatatatttcttagaaatgaattatattttaaacactcagggcattttctgttaaaccctgtgattctctgtatctacctctgttgtgacttaggccatgtacctgactggtataacttaggacctccaagtttttaatgtgttacatgattgacaggtttcccaggtagggtgaacacacccatggggtgtgccacgtgatccagcaaggtgagcaggggatcctaaaacactgcccctttatcctcacggtctcttataacacaccatcttggtaggcgcctatgcgatgttgttctgaagcttgaaatgtgaagctctggtttgtacaaaagaaacatgcctgatattttctctgtgaatctgtaagattgaaattctatctgccgagcttatttaaaatgagaatgtctaggatattcgatcataattcgtttatgtcctagttaacagaaatcacagatataatctggcagcagctttatcagcagacggactgagtaaactgtgtctgccttcacccaagtgtggctcgtggaactgactgaacccccagacagaaaagcactgaaatgactcggaccactcatcgccaatttcacattgatgcctcaagtttccaatcccgtgataaaggacttctttatgtgaaatcaaacatgctttttaacgcatgcattttttcctagttgtcctgctaaaatactctgctatgcagctttggtttgtcataatcaggttaaaagtgcacaaggatggtttgtgcgggaagattgtcaggccttgagaacttgtctctgggtacccagtttatcttttccatcatttttcccctttctagtgacacccttttccctctctcccctcagggaatgactggatggaagttacatatacttttactaattccactcagctgtgcccgtgaatatccctcctctattggatacagaccactgcagtggggtgtgatacaatcacatctccatttctcccagcagcctactagaaaggtcttcagctttgaattgaggaggcagaacctttgtgtttgtgcagtctggccgtttgccagtgccacatcatgtataggagttctcacgtctgcctctcagtgcagcaggataggcacagttattaattagcactattgtacaggtgaggagactcaggctgagaatggcttttttttttttttttttttttggtcctgagattttagaaatgtagtcagttttattaaagaaatatcaggcattcttctctccgggtcaaactggaagcccagtttcgaggactgccctgggtagaaaaatcctccttccctgaagcccaactcagttcttggggactgcctggccaggctacttcatactcttgtcaccagcgctcaaggtaccttgtcccctcctccaacctgagttctcctggcccttacttctgctttgctaaaattcccatgtgcagactgggtgtggtgtctcacgcctgtaatcccagcactttgggaggctgaggtgggcaaatctcttgagctcaggggttcaagaccagcctgggcaacatggtgaaaccccgtgtctaccaaaaaatacaaaaattagcccggcatggtggtgggcacctgtggtcccagctactcgggaggctgaggtgggagaatctcttgagcctgggaggtcaaggctgcagtgagctatgatcatgccactgcactccagcctgggtgacagagtgagattctgtctcaaaaaaaaaaaaaaaaaaaaaaaatcctatattctgtcatgtcagactttctttgtcatttaatttttttgaataggaatctgccctatctggtgtctgggcctcacgtgattcctgcatcatttccactcctggttatgaatgttttgctgcgaatcaccatggtgggacgttttcctcacattcacaggcacaggactgtgccatgatccagaatagaaagctggataaaatagagataaatttagctggagaaagcagctaaggaaggggcagaccaggaatgatagcccagaacatctgaattcaaagggtctatattttgactcattaatggaaacacttgtgaccgggagaaactgagaccttctcgccggcctgtcagcccaggtggctgagaaaaaagacattcaaagaaatggacaagaaccaagagcatttgtttgtaggttactctgatgtattaattctaccttttatatgtttgttgtttatttacttctaaaacaaagtgcttcaaagagaaataattccttagggtaagattgtcttatttaaagaagctcttttagtgttttgggtacacaggttgctagtaatttatttgtattctgttctgggtaggatcagtttcgatagtgactttctttaaagatatttttttccaggacagcagggctgttaagtgaagtgttgttttcacatttaatcgtttctctcttaagaaaaaccacatctttcgactctactgtaagattcagaaatttgataccatccttactgaagttatagccaaattctgaaatatagtcaaggatgatattttataaaacaaaatctatggaaaatccctcatttgttcttctaggttacgttcttttcgtctcgatttgacaagaggggccaagcctctttctacatcgttcgatgtcagcatgaattttcagtggagcaagaaagtaattttagtatccataatgacttgcactacaattgggttaacagcatggaaaataaatatttaagtcaaccttccctgcaggattctaaatacagatctgctcgtctctgtggctccactggcagaaatgttatgtttcttcagcttatggtttttcagaattagactcaacatggctttgcgtagggaaataaatccacattgctttataaagggattttttaatttcaaatttattatctcccccgccctccgaaagccttgcacagactgtggacatggttattctagaagagtccatcagccgttaagataaacaccagcctgtatgccctgaaacaaatgcgtagaagacacaaaaagacacaagaaagcgaagcaagagaagtcaaatcatcttgctgttttaactcctttttttagacttagcaaggaatttgtagggggaatttgtatgtgcagagaatatttgctatgaacagactaatgttccttattaattccagtgagttctgtcagaatacaggttagttgatatagattctgtggaccaaagagaatattttcagcttattgattaagaactatactctatcaatccatggctgcttttctaaacaagacctctaagaagtcaaattatattccccaaaacacaagagcaacctgatcccagccagcctccaaggcggctgtgatgtagaataggccctcgattagatcacaagttcattctcctttcacctccagaagaatgcaccccaaaagatggccggtaacatgggttacctgtgcagaagagtgactgggagagactgggacagagtttcctaagcaagctattgttcgttttgaattttgtctcatgggactgtattccctattcaataaataaaaatttaaaagtatttctgctttatttgcttcatgaagacaactgcgattccaaagctttgactctatcagtcttaaaggtgaactagaaaaatctcagtaaataaaagcctgtacatctcaactcagtcatcaaaggcttttccttgctgcatcttagggaaaaagaggcaactgtaagtggctgacaaaatcactctattaactgaagatctggggccttatgcccaaatttccccattccctgggagattccttaagaacacttaagcaggaacatgtttttatcaaatgattgctttactagggctgctaccgataataatagctaccactttgcaaccctggggagcttggtcttggaggatagagtctgactgaagttctaggcaggtgaaagggaaaggcagaagcctagagggctactgccaaggggatctggagccatcttcaggctcttgccagctgctggctggcagggcagttaatggtgaaatggtagacatcagaaccagaatactgtaggcaaaatgagaggtcagactgggaggggcagggacagccgttcattcatgcacacaaaaaaatgacacccagaggatgaacctgacaggccgtgcaggcagagggagactggtataaggaaacagatccagggcagtctaacgggaaactgagcccaagcatgtgggactcaagacagagtctggggatcaggagcaaggagagagccagtctggcctgcagcgtcaaggggacaagtcggtcaatcctcaggtacctggcaaagcaagacaggctggagtgacagaagcactggatttcctaagagttacaagcatggggctgcagtgcacagcgctcaccaggcgatttgttgctggaactgaggcatgagattagaatgagaccagcacagggcacgctttacgggctgtgtggggaggaaaagggtctgcaagtggagggaaagaacactggaagcagagagccagaaaggaagaggaaaaggggcaataaaggcatgctttgtctttggcatgcaccaacaacctaaagagttttccagatttcctttatttacttgcaaaccacatttacttaaaaatatgtacttatgttgcattttaagttgtatgtatattgccatgttgaaggtttgaaggtatacttcaaagtatatcatgtaactagagaacaaagtaggtttctgcttaagctggaccctaaatgagattaaaagcataattttctgcctcaccatagcaattttcccagcagcaaaatttctgctgctgcttaaaagatctgtaatcctataactctgtcaagtagacatgtcagttttggggtgatgaaaatgttcaggaattagatagccgcgatggttgttcaaccttgccaaagtgctaaaaaccactgaacggtaggtatactttaaaaggtttaattttatggtccgtgaattttatacctcagtttttgggcaggggtgggagggcaagaggcacattcaggtgaaaagtcatagtgaggtagaagcttaggagagagaaatggattttatatctgtgacaatcaattaaaagttaggacagctggtcatttctggaagcagtgacttccttgtttcttcgaagaggtgtaaagctcctgagttggaggataggtgggttgaatgaatcgcagccatactcctaaacatggagtgaattgtctacatgttcaggtcagatatactcaacaggcaccagggcttggagcccaggacacagcttgtgacatctgacagtgcccctaagcagctacttcagggatatcccatttaccaaattcccctaaaaagtacctttctgtgtgtagaacacaaagtatgtgctcattttactgagtctgtggctgcccccttaggggatcagaagcaattaataccctttgtcatctgaaatacagtccaacttcatatttatcctgtttgccttgtcatcagcattgcaacaatgctcatgaatccttaggctcggatgaatccagctttttgacccagtttgcatggccgcatgtagttttaccactttgcctctttcttctgtgcatgtacattacacacagagggagacagagaagggtggcatctaaaacagagaaaagcatctcagaagggagaggtgtggtggcttcttttaagcaattcttcctcagtccgctgggctcaatgcagcttccctaagactctgtcacccagtgaatacatggggagcatctgatgtgtgttacccggtgtccacggggagtgttagcagggcccaggaagcaagtccaagtacaaccttcctgtcacacatcacctcaataacacactgggaccttctcatcgacctcagcctcctcataacccctttgctggccagggtgaggtcagaaaggtccgtgatggctgtgtgccccacacccactcagctagcctgggctttcctgggtttggtgctttctttataaagctgccttctataatggagctattttgaggatgcatggctttttccaagccatattatctctgcgccctccatccgagcactttcatatgcagatgaagccctcccctgactgcctttgtgacactgggctccagctggactgaaggtctcttactgcctcccaagagctgtttcaggcctcattgcccctgtttgaactgctcatattgtccaaagtcttcctacttcctcccactacctccacctgccagtttctgtttcctggtctggctgatttctatttatcctggaaggctgattacttaccacctccctcaggaagccatcctggctgcttctgcttccttcctactactgctgaggtagggcccatctggtatgtgtttcattccactctaagacccttgaggggaaggtttgtgactctgtattcgacgacacagcagggaacttgcatgaatcgcaagtgtggtgtgcatacgtggatgtctgttcggctaagcccagttcttcagtttctgacatgactgcttgtcaacaggagtgtgtgttgttttttgctcacaccaagaatgctgatcaggaaaagaacttttctgtggcaaactgataagaatctctgggtgattatagatgcctgggctgctctgttttcttttgttttactcagatgggcagattcagaaattggtatttgtcttagaatcataccgttttgaaccagaagggaaccagaggctgaggaagcttaaacagctcctgcagtccttcaggcaacaggtagtgagggcagagcccaggaagcccctacaacaccttgctttccccgctttttaaaattctctgtgtgtttaacaagttaaaaggtaagcaggccgggcgtggtggctcaggcttgtaatcccagcactttgggaggccgaggcgggtggatcacctgaggtcaggagttcaaggccagcctggccaacatggtgaaaccccgtctctactaaaaatacaaaaattaggtggtgcgtggctatagtcccagctacttgggaggctgaggcaggagaatcgcctgaaaccagaaagcagaggttgcagtgaggtgaggttgcgccattgcactccagcctgggcaatagagcaagactctgtctaaaaaaaaaaacaaaaaaacaaaaaaaaaccctgtaatcccagctactcaggaggctaaagtaggagaatcgcttgagcctgggaggtagaggttgcggtgaactgagatcacgccattgcactccagcctgggcaacaagagcgaaactccattcaaaaaaaaaaaaaaaaaaaaagtaatttggtgattccctttttgttttacctagttttatccagaaagagctgtgtggactctctgcctgacctcagtgttcttttcaggtggctttgcagatcgctcctccatgtaccagtgagaagcattatgagcatctgggacggtgctgtaacaaatgtgaaccaggtacacctgcttctgagccaccttgcattgcccctcaaaagtgggtgaggctttcattattttttctgtctgccagatgaaaaaaagaaattggatagacgcgttatggtagtggcaggtggtaatgtctgtcactctgaagacaaaaatctttctctcaatagagatttgaagggattttaaaatcccttagaaaaaaacaaaaacaactttaaaaactgttgcttaatttgggctgaaacacaattttccaaaacactatttctcgagatggcaagaagtttttaaaaactaatattttagcactttatgactcaaactctcaaatgtgaaatgcagctcttacttaaaattgttttcacagaaattttattttggaataaccacactggaattgttgctgctaaaaattgcctaaacccttgtcgtacctttttccatatacctgttgaggagcagaaggtggactggctaccacctgccccaagttgttctgccagaagtgtggctgactatttctgcagccccagtgaaagccacagtccacggggcccgcactctctcatcattctggggaggggaaggtgggttaccttataacaagatattttggatatttcagctacaattatttattggatgtgcagaaccaagatccagtaatggtcaagtgtgtgttggataggcgggtggggcgcagcgtgacacttggtcaaacgaagctaaccatgagccggtagtaagtgtagaggaagttaacaaaaagaagttaacaagaagttgcctatccagatggaaggcagaggggagaggggatgggtgatgaagttcctcttgcctacccctcttattccctgagtgggttccagggaatctttcaagttctgcggcccagtttaaaatcatcattctattccttttttttttttttctttttttctttttgagatggggtcttgctctgttgcccaggctggagtgcagtggcatgatttcaggtcactgcaacctccatctcccagaggttgaggcagcaattctcctgcctcagcctcccaagtagctgggactacagtcacctgccaccacgcctggctgatttttgtatctttagtagagacgagatttcaccatttggccaggctagtctcaaatttctggcctcaggtgatccgcccgtctccgcctcccaaactgctgggattacaggtgtgagccaccgtgcctggcccatcattctattccttagcagactttttgggtgcagagggtggttggctttttacttagaagaattaagagactgctgtgaccacaggctcagcggacccaggtggggttatttcagccagctgcgtggcctgaggagcccagggtgctgcagtcactgcattgtggcctcttctcctgtgtcatattgtctttggggggtgtcctgggatcatgggcaccaatgattattggtcccatagatgggtgcaatttttgttgctgttttgctttgtgttgctgtttttgtttggttttttgatggttgcatttttctccctcatttttttaaggaaagtacatgtcttctaaatgcactactacctctgacagtgtatgtctgccctgtggcccggatgaatacttggatagctggaatgaagaagataaatgcttgctgcataaagtttgtgatacaggtgagcccgtcctgtcagtgtgtcagtgggaagtgtagaaacctcagacctctttttctatagaaacatttttagaggcagccaatgatgtttcgtttcaggaacatgaaaggaagttgtgactacacatcccaagaaagatgcgttttagatccccaaggcctctgttaaaattcttcatttagaacatttgttctggaatatatttatgttgccatttaatcatgggacacatcatagacttgacataatgtttccataatgttcccacctatttttgtgtggtttaatcctccctgaaatcctgtaggtagccatacttatcccttttattttatttgtttatttatttatttatttttttaatttatttgagacggagtctcgctctgtcgcccaggctggagtgcagtggcgcgatctcagctcactgcaagctctgcctcccaggttcatgccattctcctgcctcagcctcctgagtagctgggactacaggcaccccccaccacgcccagctaattttttgtacttttagtagagacggggtttcaccatgttagccaggatggtctcgatctcctgaccttgtgatctgcccgcctcggccttccaaagtgctgggattacaggtgtgagccaccgtgcccggcctatcccctttaaagattgagaaacggagattcagagaggttgaataacttctccaaggttaacacgtgtgaagcaggactcaaaaccagctctactcttcacctttttcctaaactataaatattttattaacacagtctgatctccttaccagactgtcttaagtttcttgcctggaatgttttttaaagtatagtttatttgaaggaatcaggagcaaaatatgtctcttaattctcttaagaaacagaggttcctttctctcccttctttcctttttccattgagctcattttttgaagaaaccgtgatgttagtcctgtggagattgcacaggccacattttgttggttgcattcccttggtatcatttaatgtattattctgtcccttatatttcttttttctttcttttttttttttttttttgagatggagtcttgctctgtcacccaggctggagtgcagtggcacaatctcagctcactgcaaccactccctcccgggtttaagctattctgctgcctcagcctccccagtagctgggattacaggcacgtgccaccatgcctggctaatttttgtatttttagtagggctgaggtttcaccgtgttggccaggttggtctcaaactcctgacctcaagtgatgcacccgcctcagcctcccaaagtgctgggattacaggcgtgagccacaatgcccggcctgaccccttcttataaattggttgttagatcaatttcttataaattggttgttagctctagaaggccaatcagattctgctttgttttttgttttgtttgtggcaaacttcatatataatatagttcatacatagaatattagaaccatgtaatagctgagcattcctctttctaacattagcagctgctgatggtcatggtttagatgtgtttcctttaagggctgcagaaaggtgatgttctgattctctcatttctttttcatttattagctggcatgctttatgaagataaacttccctcatcaactatttattgataaagttactgcatttatcctgtagtgcagtacatatagaaaagatagaataaatgcttttaaccttatttatcactttgcaaaacaatatcttaatcatccagcattctcccaaggacttatattatggagctatttgaggtgttttagtttcagtctattgcagttattgttgctgttgtttgtttgtttgtttttgagtcttgctctgtcgcccaagctggagtgcagtggcacaattttggctcactgcaaccttggcctcccgggttcaaacgattctcctgccttggcctcccaagtagctgggattacaggcacgtgccaccatgccctgctaacttttatatttttagtagagagggcgtttcaccgtgtgtccaggctggtcctgaactcctgacctcaagggatccccccgcctcggcctcccaaagcgctgggattacagcatgagccatggtcccttgcctgcaataactggttgtaatggtgctcagattgtcacatttctatgaggtggcccaaggtgttttgatacagcccaggcatctattgcttccatgcttagcttgcacaatccttgtcttaaactacaatcagacatttctctaaggtttcatgattgtttttagaggaacattttatttagtgacctcagtctggactctagagaagactcactactggattgatccttgtgtatagaagttttttccccaatggacagaattagagaataagtgtttcttttaacaccataatttttctaatgtgctggagacagctggcagattttggctagggaaggtaacatggaaactccactgagcagaagcatctgatcaagccttttttatttcccactgcttagtaatgaccttgactcattgctgtctcttggaaataaagattcattctgtctactgccaaagttgattaaagccaaaaatctggtacattacatacaatattttaaattatgtcaaaattattcatcaccacccaggcttacattcggatgggatcctaggagtagttggaattttccagagaagtggcatgtgtctgtggacgttcccatgtgttgtggacatgtttttgcattttggccttgatgttgcagagctgactggggccttggaagagtgggcactgcaggaaatggggacttctccagggtcaccaagcttgggtctataaagattggaaataggaaatgtcccctccctactggctgtaacttgagaccataagagacagcgggtttctggtttgttggcttgtttttcccttggaattcctataagtattcaggaatataaggtgcaggggctgtttggacaatccaggtgagaaggagccctagaagggtacaaggtctgttttaaataatgttattgttttgtatcatgttggggggtatggggtcatgtacttatgtgcagttgactgtggttatgcacagtagttatgttctataaagtcaccgtgaacactgaattagcaaatcctgagccattactcctagtggattacagggtgaggttcctgcaagcctccagtcacactgtcacggactgatcaccacgtaaacttgtttcatgtgtgtttctgttaaagacaccttatttgatacatgttgttgattcattaacattgcactcatggccaacagcactgtaattcatgcctgagtgaagcttctctaacacacttattttctctgtaaggcacaccacagttttcttgcacttagaacgctagacagctcttcagcacgacagttgggggctgttgtaagcagggaaatcaccaacaaaaagctcgtttaccttctgtgagctgaaacaagaaggcagagcatcgattacccaacctcagccagaaacctgagtgtggagcaactcaaaatgtacacggttctgtccctgaaggactgcagaagtaccaagaggattgattttggggtgcaaataaattttattgagcaggtgaattcacaaatatgaatctgcaaataatgaggactattgattgatcaataatttgattcatatttgtgtgtgtatgtagtttataacagatacgtgtgtgtgtgtgtgtgtagtttacaacagatcaattcccacgtacctgcattccagaaaaactggaaggggccaggagatttggaacaagaaggccatgtgttgtgaaaacagaaacaagcatgttaccctgagtgcttgaggagagtttgactccaagcatgtcactgggcctgcctctgtaccctctccatgcatgtaactccacaacaacccgttttcaccctgggatgcctcaggatcctacaatgaatcctaaacctccagaaaccctgttctctaaggtccagtcttgcgttagtcttatacatatggcatttgaatttacaaaaaacgaggaagctcaactctgtgacccttctgcattcgccaaaacattcaatgatcatcaattcccaagtccttatctttctactaacatgaaaattgacttttaaaaaaagcccacaaaactcttaattatgagagagagaagaacccccccgtgacgttttcgtgccagtgcaggaagtgcgaggaggaacttgggacttctcgagcagtgtcctggtgattcactctgcaggcctgccaggcgggctgctgctctgggctggatgttggatagcgcagtcgtgggcggtgtgtttgggctgcctgcccctccctggccactgacctgtctcttgtctcccgcaggcaaggccctggtggccgtggtcgccggcaacagcacgaccccccggcgctgcgcgtgcacggctgggtaccactggagccaggactgcgagtgctgccgccgcaacaccgagtgcgcgccgggcctgggcgcccagcacccgtgtacgggttggatgtgtgcgtctgtcggctcttgctgagccatgcaaagccagctttgagacagtcttgataatagcagcaagaaagctccagggtgctaggcagcattggaggaacctgagggatggggaaaggtgggggctgattttccacgagatacaggcccaggcaagacctgagaatgaatcctcggcttaggttcttcaaagggactgcgggcaatttgcctacatgctctggccatggccaggggttgctggggctcctccatccgtggaaacctgggatccccacttaggagccagcaggatagtgcaggggtgattggacgtttttgaaaagtgtgcacccattagaattttggaaaaaccatgcatcccccaccccagcacgtttttaagttgacatctaaaaagttttgttacaagtttgaagaactgataaggacttagttaccagggaattataactgcgataacactgaagaaacgaatccaggggaatgtaaacaccatggccatttgtgcccactatgattcatttttaaatgcgccaattgtatttaactattggacagtttacatagttactttctctccttttgtttcctatccattccaccttccccatagaattttatcctgatatattttttatgcttggagggtttttactaatcaccttttcacattcgaatatgcacatattgaaaaatatgcacctatttgaaatctttatttattttatttattttttttttgagatggagttttgctcttgttgcccaggctggagtgcaatggcacaatctcggctcaccgcaacctctgcctcccaggttcaagcgattctcctgcctcagcctcttgaataactgggattaccgggatgcaccaccacgcctggctaattttgtatttttggtagagatggggtttctctatgttggtcaggctggtctcgaactcccgacttcaggtgatctgcccacctcggcctcccaaagtgctgggctgggattataggcatgagccaccacacctagtcaaaatcttaatttttaaatatttactttgactgagggttaaaaacatttcttctggaccaagttgtcactgcatttattattacacaattggtcacaaatgaatatatcctattttgctatattataatcataaaagtaaaaacttctgacctccataatgagtgggattgtttttccaattcatatatttgtggctaaatattacttcttgctaaaatgcaacagcattcaacatcaattctgtttctactttttgtttttatgtatgtaagtgctgagaaatttgttcacataaataactgaatggcaaaggaaacactttggttataggtgtgtccctcaatttctttcagtaccttctgatttatgtggccaagctcacctactgatgtgatatcagaagttatttttaacgctctatcagttgagaattcaattgtgtccttcaattttgttgaaagtaaaggaatagaaatccttttgagttgaaaaagtatttcttagagtaatttgctttcctgacttctaggaagtataacaaaagcgtttttttccacgacttaacaaatgattatttatgcctattactcattcccttagaggcacctggttttaacccaaaatacttggacagggttgggagaattaaaatattatccatttcaattcatatcaaggaaaatgtccatcacagagtctaactgacacattcggtctttattatcaaatgcattgactaaaccagatgtgctttctcttacaaaaagtctgacttgattttttaatggttaaaatggatctccctatcacagccaactccctctgaattctgattctaaaatagaagaggcccagagcctttcctttaggttttcaccagcatgtcacatcagggattctattagactttctctctgccttgtacctttggaaatgggttcatttttggacaaaataggttgaggatagaggggaaacggtagatgaatggaaatttcactcctgtcccaccctgcataatttcaattcagaacaagtcagcctgatcgcagctgccccatttctatcatcctgcttttgcccttaatagagcgggaaaggtgggaactgtgctgggaggcgcaggaactctgccatccccaatgtccacttgtcacctcgttcagcatctcagaggtttggcagcatagcagcaaactatggggtgggtaaaaagtatatcttttgtgaaatgggaaaagtgtgattatgaaagggagcaaggaaaggagcctgcaggatgcttctggcaggtcagtgttactaagagtcatatggaagtcaagctatggaaattaacacccttaaccctttgtatgcctgttagcccccgtctcttcgattttgagggcttctcacaactctagattgtgcttctcttttaaaaagctgttcaaattaatgtgagttattagatgtcaactgggctcttcttaataaagattcaaggcaaatcaaattgctaggtgaaggagcgggtaccctacctagccagccaaattgcagaaatcaacagtatacttcatacttgactctggacaaagaaaatttatttcctttttttagtgttttattcacgaaagtaaatcacagaagtgctactaatttcaggagtaatttgtggtttgggcaccagccagttgcctgattatgatatcacatagtagccaatgttcttcttgggacttaccgaagaatcatcatgtgtggattgcagtagagggaataggcataggaaacctgagacatttattttgacagtgtagtttttgaagaatatgagagtcaagtcagttcactaaccaggatcagctcctactttcaacactgtccattaaggaaggggtctaagatccattgtgccactgtgtttatcagtaaagttttattggaacacaccctcgtgcattgcttttaatgtattgttggactgctttcatgctatgagtagctgcagcagagaccataggcctgcaaagcctaagatatttactctatgaccctttatagaaaatgtttgataccaacccttggttgcagggaaagagacctgtagggttcttcctcgtcttctttttttaactgagaaaactttgttgacactctgatatttggactgaggagattaagctcatcagaagaggtcaggacagtgaccttcaaagcagtaatgtgtctgccattccctgcagacagaggctgggctagctggcaggtgcatgggggaaaacaagagacagatagcaggagcagtcaacatcggctcccagactaggaaacaaagtgtcggtgaccaggggagtggctcagaacaacaaagggtcatgaccagagctagcctgacctggacatcacataccagtgttagtggcctgacatcaagtcagttacctttctgagcgtggttccataactcactgctggggtcagaactgctctgtgggcccaagcctgtgggagctgaagaagttagacacaggggtgggcacaggggtgggaggtgagggcagagaggggcagcgcctcacctccagtcctctggagtcccagcctggatgatctctaagtgacctcgtttgttttttgtttgttctgtctgggttgtttttttttttttttctcacagtgcagctcaacaaggacacagtgtgcaaaccttgccttgcaggctacttctctgatgccttttcctccacggacaaatgcagaccctggaccaagtaagtaacaacaaaggagtcagaagagatggttggtttttaaacaactcaacctccactgtctcgtctgggttgaaaacggacggattctgttgggttaggcttcctcttgaagccacgttcaaaatggaaaaagtctgtcaattcagcctggggaaaataaaccagtcaaactaattcttcagccctatgtgtgacaggaacttcgtgtgactttttagatttggtaatctgtgacttacggttgcagctttttctaaccttgtttggttgaaaatgatttataacatttattcagtggtcacgcctacttctcccgatttcccaacatcactgatttattcatccagttatttgtgtgtgtgtgtacatatagaagcctcctgtttatataaatgtttgcatgctgtcaacatcgtggggttttttttcacatattatatcctgaagctttttctatattagttcaccagttcatgattttcttggcttttcacagctgcatagtatttcattgtagagatgtactgtaagttatgtaataagttctttattgatagtcatttaggttgttcccagtcttttacagtaatacataattttttaatgaagaatctcatatatatatgatttctcacgtatgtgagtaaatctatagtggaattcatgggtcctttcattgcatgtttgttgttgcataccaataatcaacataatgattctttcagttccctgtatatttcttattaaatgtttattttctgctgggcatggtggcacgtgcctgtaatcccagctactcaggagtcagaggcaggaggtttgcttgagcccaggagtttgagaacagcctgggcaacatagcaagaccccatctcacatttttaaacaatgaaaattaaattaaaatacataaataaatgtttattttctgattcacttatccaaattttatgttcaagaggattttctgtgtttttcaaaaagagcaatcagcaaaagtatgtcacttaaccatgtaattgaagctattggaatatgcattttttttttcttgagacatgatctcgctctgttgcccaggccaaagtgcagtggtacaaacacggctcactgcaccttcaacctcctgggctcaagcaatcctcctgcctttgcctccacagtagctgagaccacaggcacgtacaccgcacccagctgatttttaaattttttgtagagacagggtttcaccatgttgcccaggctagtctctaattcctgggctcaagcaatcttcttgcctcagcctcccaaagtgctaggatgacaggcctgagccacccaggcacggccagaatattctttcctgaagactctgctctgctcctttgctgaccgcaatctcagagtagctgtcagagaacacaggcagcgtttgcttttgtttatttgtttgtcccaccttgtgctgttctcctccctgtggaaggcacaggggattcaaatgtccaagaaggcgtgggttcctctcctgaaggagctggcaatctgggagagttttgcatttgttcactttttaaaaaacaagcttataaaaccaaagcactgaaccaccttttcccccacagctgtaccttccttggaaagagagtagaacatcatgggacagagaaatccgatgcggtttgcagttcttctctgccagctagaaaaccaccaaatggtatgtttaaaaagagcctgttggttgatagatgtgccccagggtggtcagctggtttagatccctcccagatggcacgtggatttgcgggcgtcctctccccctttatttcatcccgtgcatggtcagctgaatatttcattctcatcagtattttaattccaggtatgttgtttccttgataattttctacactggattgggggtaactaataatgttttgatatacataaaaagaaaatagagctgcaaacataaattaaaatgctcagacatggtgggatgatggtggtcacaagtgagggtgtctatgaggagattttagtcatcttcccaaattgttaggatctagctatcattatctatggaacatgttgtagattagattaaattaatcttttttttttttctttttgagatagagtgtcactctgccacccaggctggagtgcagtggcgtgatatcagctcactgcaacctccaactcccgggttcaagcgattctcctgcctcagcctcctgagtagctgggattacaggcgcacaccaccatgcccagctagtttttgtgtttttagtagagacagggtttcaccgtgttggccaggctggtctcaaactcctggccccaggtgatctgcccgccttggtctcccaaagtgctaggattacagtagtgagccactgtgcccagccacattaaattaatcttaagtagagtttcagattgccagaaagttgatggtggaggctggttacttggtgagcaggacagtgtggaggtgtgggtccagatatcggaagagattgcttcagtggcaaggagacctttcagatgaggaaagagaacaataggccacagaataaccgggttaacaagctttgaccaagaaatcaggggtttggccttgatgttttgggaaacaggaagacattaaagcattctggatgtggagttacacaatcagagcaaacttttttaaagaccatttggcagataacattaaatataactgaaggaataaaaagttattttaaaaaagaggagaggaaaagtaggagtccaggaaaccaggtcatgtaaatcaagagttttgagcaaggattctagcaatgaagtgatcagggagggatgaagagaacagttgggtccacgtggtgtcggggatgaaaactacagaaatatttcacaggatggctgtggttctgttctcatgaccagcaaacccctggtgccctgttgctattaggaaagagatagaagaagctccttttgtctgcaggggtcatttttctggggatactgaagggttctggaggttagccaaaatgagactgggtgatgtggtgagcatgatgagagctgttctaaggtagaaacaccgtaatggccctggctgctctcccgtagagtgaaaccggactgagcagggctggctgagattgtggatctcaccctttggaatgtgagtgctcgcggacaaagggcagccaagggtggggactgtcacttctgctatcccagaccaacatttttgattctgaggtttgatttaccgggatttgtttttcaactgcgtaaaattaaagaatctttactaccatatttctcattttcttccaatacagaaccccatgtttacttgcccggtttaataattctgcttctcttcgcgtctgtggccctggtggctgccatcatctttggcgtttgctataggaaaaaagggaaagcactcacaggtattgtgtctatggtggtttttgcaaaccaatcttaaaagatagatttctaggtaaatgctttggaagttgagtagattgtctacttgctgcctatggtgatctgcttaaactaaagcaaaacacgttttatcattctctggcaaaaagaaacaaaactccaaaaacttgaaaaagccaatatcctgcctagttgtatataagggaacaggaatacgctggcgttcaggaaacggatgacttgtaagctctgtatttgagttgtgtagactctgcagcatcacatatatgggagcttgcatttatcctagaatacatcaatttttaatgcatgcttttaaaatatacataaaatatttagatgaccggtaggggggaatttctgactggagtgttactttgaaataagaaccttcggtgggtgtggtggctcacacttgtaatcccagcactttgagaggccgaggcaggtggatcacctgaggtcaggagtttgagagcagcctggccaacatggtgaaaccccatctgtactaaaaatacaaaattagccagacatggtggcacatgcctgtaattccagctacttgagaggctgaggtaggaggatcacttgaacctaggaggcagaggttgcagtgagccaagatcatgccattgcactccagcctggacaacaagagcaaaacttcatctcaaaaaaaaaaaaaaaaaaaaaaagaaccttcgattatgaaaataagttatattgaataaaatttgggtgcttattcttagaatagacggtcaagtcttatcctgtttcttgggaataattttcccacacaaatttgttagtgtctttaaacatcacgtcatgtttaacttgtagactacaaagctaaaaatgtgtaatttttacgaaaggattcaaggcatcattagatttcctaagaatatctcttaaatctttcctttaatattcaagtcattctcttttgacttgaatattaaaaacctgctgtttcaccatccttttccattttcagttgctctcttatttatttatttatttacttatttattttttagacagagtctcgctatgttgcctaggctggagtgtagtggcacgatctcgactcactgcagcctccgcctcccaggttcaagtgattctcctgcctcagcctcccgagtagctgggattacaggcatttgccaccacgcccagctaatttttgtatttttagtagaaatggggtttgaccatgttggccaggctggtctcgatctcctggcctcaggtgatccactggcctctgccttccaaagtgctgggattacaggcgtgagccaccacgcctggcccagttggttgcttatttatagggcccacctttgccttgctgtgatttgatcagttttcccacgtcacactcttggacttcaagagaccctgcatatctagctacttctctaaccattacattgccaaatgaaacactagacaatcagaagattaattaaagaggaaagatggggattgcagatgccagtgttaagcagtgagcaatgtttgagtgatgaccctttttttttttttttttttttgagacagagtctcgctctgtcgcccaagctggagtgcagtggtgtgatctcagctcactgcaacctccgcctcctgggttgcagcgattctcctccctcagcctcctgagtacctgggattacgggcatttgccaccatgcctggctaatttttgtatttttagtagagatggggtttcaccacgttggtcaggctggtctcgaactcctgacctcatgatccacccaccttggcctcccaaagtgctgggattacatgcatgagccaccgcacccagccaagtggtgaccatttcttaaagagtctgttcattgttgaatgcctttatttagtgcagcttcacctccttaacaacatcattactagggatttggataatgcatgttcagatgatgaaggtcgcttgtaggcacgtttatgtgagataaacagacttcctgatgttttgttctttaggtttttctttttgatactattttactgccatatgggcctaccatttagtgaactggatgtcatgactgttagctcttcatcctttcatccatacatgtttattgatcatcagggactggactgacactggggtctcaatatcgagcaacacagacacagccagtgccctcctggaggaagcatcttagtgggcagggtaggcgttaagcccacagagggaagctgagtatgcaagagaaggtgctgagcaccaagtggcagatgacagaaggtcagcccatccctggggccagccagggtctcccagaggaggaaatgggtgagttaagatctgaaagacaagtcagaattcactagacaaggggcatcaggagaaccacaggcattctatcgtgagagagctgcatgatgaggggagcacagtgcattagcgggctggaaggagctaatggcaccgtagcagaaagccagggaccaagtggaagatgaggctggagaggagggcatggcgagaccatgtagcggctgctgaaggagtttgctccttgtccttagcaaaggggaccaagggcggccctctggctttagagtagcaaacaaatgtgtggtacagtgagagtagatgcaggcgcaccagttaggaagctgtttgcagttgtccagaggagaggtgatcatggcaggtctgcatgtttatcagctccgtggacaggtattattttttagtgccatttgtgattgtctagactgattcctccaaggaaacagctgcaactgtccttttctcttttggtggggggtagggagggcgtggtttaccttgatatataattgcaaaataagagaaaagaagcaagaataatgatgataatagcaatagctgacacatattaaatatttaatatgtgctgacatgactatatatattttgcgtgtactacgtacatcttcacaacagcaccatgaggtgggcactattatttcccctattttgtgatgagactgcttagcaccctccctggcacgcttaagtgctcattagctgttacactgaactgtgatgatcttcccatggagaacctgacaactcctaactttagtcggttttgttttttattgttgttgctttttgagacagggtctcactttgtcacccaggcaggactgcagtggcacaagcgtggctcactgcagcctcgacctccctcccgggctcaaacaatcctcccacctcagccccccaagtagctgggaccacaggcatgcaccaccatgcccggctaatttttgtatttttttatagaggtggggtttcaccatgttgcccaagctggtctcaaactcctgagctgaagcggtccgcccacctcagcctcccaaagtgctgggattacaggtgtgagccaccgggtccagccctaactttagtctttatagtgaacccaacattaaatgttcattagaagtgggataaaattgtatctttgcataatataaattcatagatttcttaaaattcataaaatttaaccttttaggtttcatcacttctgtaagagtgggtggagatgtacttttttgaacatattcttctttcttctgagaagcagccagatatagtggaaaaggtcttggggcccgctggtctcagtgggtctgacacctagcttgctgtgtttgcctcacttttatagtacattcaacctagttcactggaaaaaccagtctcctagacatgttttctttgttcttctatgatgtctaacttagtccctcatagccaaagaaaacttgttaagagaatgagaatgtctatagtcatagcagcacctctgacagcccccaaatgtgcccagaggaagtcactgaaacgttagaggatcatgttttgctttgcatagaacaggaagttctgtttttgatgggagtaagatggcttcatagcctttattttttattttttatttttttattttattttttggtttttttgagacagagtttcgctctgttgcctaggttggagtgcagtggcacaatctcagctcactgcagcctccgcctgccaggttcaagcaattctcctgcttcagcctcccaagtagctgggattacaggacattgccaccatgcccggctaatttttgtatttttagtagagatgtggtttcaccatgttggccaggctagtcatgaactcctgacctcaagtgatccacctgccttggcctcccaaagtgctggcattacaggtgtgagccaccgcgcctggcccttcatagcctttaaatcagttgatttacttttaaatgctttcactcccaggagtgctcactgaaagacttgcggtggactctgttgaaagataatattgaactgacctagtggtcataatactgagcctgatagagaaataaaaatctagaatgattgcacttatatgtgtagtgttccccaaaagtcaaatatacagagatatagaataaaacaatggttagcagggacagggggaaagaaaatggggagatgtgggtcggaggatacaaagtagcagatgtgcaggatgaagaaagttgtccaggaatctaatgtacagatggggactgtagttaatcatgttgtatcatattcaagatttttgctaaatttgtagattttagcggatcttgccacacacacataaaaatgggtaactaagtgagatgatgggtatgttaatttgcttcactatagtaaccattttactatctatatttgtcctataacatgttgtataccttaaatatacataataacctttatttaaaagaaaagaagtgggaaataataacttgaagtccttatccttgctttgtgttttctagctaatttgtggcactggatcaatgaggcttgtggccgcctaagtggagataaggtagagtgaacagttgttggtgcctctgttaagtacattcaacagttaggctggtagagccatcctagtcacatattgagcacccccccccacccccactttttttgagacggagtctcgctctgtgcctcaggctggagtgcaggggtgcaatctcagctcactgcaacctccacctcccagggtcaagtgattctcctgcctcagcctcctgagcagctgggattacaggagcccactaccaagcctggctaattttttgtgtttttaatagagacagggcttcaccgtgttggccacgctagtctcgaactcctggcctcaagtgatccacctgcctcagcctcccaaagtgctgggattataggcaggagccaccgcgcccggcctcagctcctttgcttacagggcatttccaggttcagtgatcaaacctcaaattccaggatggatccctgcagagcagctcaaagcccaagtccaggctcattctagatgcctgttttctttgtctttgtttccacttctgtcatctctgtgttcatgtcattttttttagtaccaatcttgattgtctggtacagattcctaagaaggatgaactgcaactttccttgactctgtagttattctggtaacattttatgttgacacagttcaaaattataggaaagtagtgagaaaaggacaaagaccttccatataccctagacataggcccaccagttgtttctattttctctcattgctttgtgatttgcttactctctgtatgtgtgtatatgaacacaggtatgttttcttcttgaatcattttacagtgaatggcagactgtgtgtcccatatccttaaatatttcagtgtgtatttaagaacaaagacattctcatatataaccatagtacatgtatcggaatcaagaaatttaacaatggtacaatactattattcaacccacatttgatattaaattttcattaattatttcattatgtcctttagatctttctttcttttcttcttcttctttttttttttttttttttttttgagacagaatctcactctctcatccaggcttgagtgcaatggcgcaatctcggctcactgcaacctctgcctcccaggttcaagcgattcttctgcctcagcctcctgagtatctgggattacaggtgcccgccaccacacccaactaatttttgtatttttagtagagacagggtttcactgtgttgcccaggctggtcttgaactcctgaactcaggtgatccacccaccttggtctcccaaaatcctgggattgcaggcatgagccaccacgcctggttagatctactttctttgatataaaatgtatacatttgaaagcataagctcaaactgatttctctaattccaggccaactcaacatgattcattctggtctttccctttcccatatttgaatctttctttccccagctgtatgaaacctggctcctattattctcagtatatttcctcatttgctcaattctagaatacatagaacgtagtttcagaattactagagcataccacagtgatacacagagctgcttactcgagttcaatatttgtttacagttgttttggggttttgtatttagattgagaatatgtagtcagaatactgtgttcaaaagtcatttgggttagctcctctccttgctcagatgtgaacatgcttttcatctgagatgcagctacattcatttgtttctagttgtattccattctagagttctcctgcactcggtaatttgaaataacacaaagttccatagtcagttttccatctgtacttgttatggtggaaataatcagtgtaaacactgttttcagcaatgtttagctaaacttgtcctaataactctaggtattaatgcctctgccttctgaatgtaaatcggcaggagtcctcaggtgacagttgtgtcagtacacacacggcaaactttggtcagcagggagcatgtgaaggtgtcttactgctgactctggaggagaagacatttccagaagatatgtgctacccagatcaaggtggtgtctgtcagggcacatgtgtaggaggtggtccctacgcacaaggcgaagatgccaggatgctctcattggtcagcaagaccgagatagaggaagacagcttcagacagatgcccacagaagatgaatacatggacaggccctcccagcccacagaccagttactgttcctcactgagcctggaagcaaatccacacctcctttctctgaacccctggaggtgggggagaatgacagtttaagccagtgcttcacggggacacagagcacagtgggttcagaaagctgcaactgcactgagcccctgtgcaggactgattggactcccatgtcctctgaaaactacttgcaaaaagaggtggacagtggccattgcccgcactgggcagccagccccagccccaactgggcagatgtctgcacaggctgccggaaccctcctggggaggactgtgaacccctcgtgggttccccaaaacgtggacccttgccccagtgcgcctatggcatgggccttccccctgaagaagaagccagcaggacggaggccagagaccagcccgaggatggggctgatgggaggctcccaagctcagcgagggcaggtgccgggtctggaagctcccctggtggccagtcccctgcatctggtaagtgacttcccagtctctcacttctgagcagaagggccagttcttggtacagggtttgggggcaggtattaccatttaggaaggaggaagctaatgggaaaacctcagcttgtgctttttctcttaataagcatttttacaggatggctttggattcagtccacgtgtttggttatacactgcgcccagcgctgtgtggcttcatcgtttaccactggggcagtttctgcatccatgcatatcccatacccttttgcattcaggcttttcatgataggattagacctcaagccccagcactgaccccggaaagacaaagtcaacatcggcgtcaggactggctgagccaaggcattccctcagatttctgctttttggtttttgttttcaaagcaccttaggcctcttaaatctcccccaagaaagcacttataagttttaggaggacacacaaaattgtttagttaatccttaattaattaatatttattgtgaataatgtgttgattctataccaaatgaatgatacagtaaaactgtcttttaaaaagtttcatgagaaaggccccttttataaccacaacgtatcatatatttatggaaccaggcagataattttaacaatttaacatcattataaagatgtatcactgcaacactgcctgagcatgaacaacccaccgattataatattataactttttcccatgagggtaaaacaccatctgttttattacatagttacaaaggactttgcagctgatagtgagggctctggctctgagaattaactgtcatttgaagggtcagggatctctttgagaatcttccgaaagctacagacactccctccagaaaaacgaatatatggatatatactatttaaggggcttcacagaatcctccaactcatatttttaaaaggcccattcataggccgcccctctccagagatgctttttcttctctgcttctttatttagactgcaagtggtgctagcagccggtcttcgaattgttttataaatctgaggtagctagatctgtgccttaaacacagagactgttttgcctcgtgggaatgatggttcctggctttaatctgttcctcaagcttgtggttttgctgcagctacatagatttactgatgtataaattcagtaatagcagttctcagtcaaacagaaaggaggagatatgtttggggatatttttcaaagaactggtatgttttcttctcagaagatctcagaattgttcttattttttaagattgtaaggaatctccatgactgggctttgctgttcgtttgcattgttctatttcttttcttttcttttcttttcttttttttttttgagaccaagtctcactctgtcgcccaggctggagtgcagtggcgcgatctcggctcattgcaacctccacctctcgggttcaagcagttctcctgcctcagcctcccgagtggctgggactataggcgcatgccaccacaccatgctaatttttgtattttcagtaaagatggggtttttccatgttggccaggctggtctcaaacgcctgacctcaggtgatccacctgcctcagtctcccaaagtgctgggattgcaggcgtgagccactgcacctggcctgttctatttcttttctctcagtttattgtcttccccttggttgtggagacagacaggaccctgggctgtggggagcgagaaagctgacgttctgtctctggcagcagccaggtcctggccacactgtcaggggcagaccggtttttcagtgggtgacaccaggaagatgatgttgcctctgtgtgaaaatcagcagcagttcttggaagaacagtgttggccagatttaaagagagagagagagacacatggatcttttaatgccataaaacaaaaagcccgatctttgctctcctgtaagagtcaaaaccgtagcctagtctgtttttcatcatcttttatttctctagcactaaaccatctagggatggagaaaaggaataaaaagtgtgtcatcaactaagtggtgttaatttgcaaaaagtttacactgctttttctgtcttcgtctggtgcttagccatgcaaaacatccgtagagagtctgcccgtggtcgacgccagcaagcgggccaaattaattttcgcctgaggagaggcagcagccagattgattttggaggctgtgctattctctccacaattacttctccatgaacaggccttatggtttctggtcaaaatagtactttctcattcttgctttttcatgtagttttttaaaaagtcacaatttacgttctataaaatgcgtgaaagaggctggagcttcggtgagcagtcctacagaggccttatcccatggtcccctcaaagcccctgtgctctcaggactgtgctgatgtgacatttgtttaagggttttttggatttttatatgagaggattttttgtttgtttttacttacaatcacatcaaatagttctggagaaatgacagtgactggggacttttcctttagggaagagtatctcctgtcccagcatctttgtgaggagaatgattatttttcagacagctccacaagtgtagacaactttaaaaatcatgatacccagtgctgttaaggctatgttagccatgttataagtcctaagaagcaaggagaatgattagcaaagatcagtgaagggggaagcatacttctggttatgtcttaaataaccatgccttaatttaggtctgaagttacgcctaatcctgatgacgtgatggttgccttggttacaagccctctcacctggagattggcgcattctcactgtgcccctagagagttatttcatgcgaaagaaaccataactgcttatgattaatgtgtctgttgttggctggtggcttggttttggctcctgaagccactcgttagtctatcacttctgagctggagaaagttggggtggtctttttttttttttatcttttaaaaatcattttgctttttaattatttcaacttttatcttagattcagggtacatgtgcaggtttgtacctgggtatattgtatgatgctgagttttggggtatgactgatctcgtcatccaggcagtgagcacagtatcttcaatccttgtttctctccctctctcccctgcctagttagaagtgcccagtgtctattgttgccttctttatgtccatgaatacccagtgtttagcttccacttataagtgagaacacgcagtgtttggttttctgtttctgtactaatttacataggataatggcctccaactgcatccatgttgctgcagaggacatgatttccttctttttctatggctgcaaacaattcttgatgaacacagaatacctatttgtttttcaattaatttattgaaggtccaatttattgaaggtccactgagccacagagccttgaaaaagcctgaaaaacaagtagggattaatgccagggagtggaccgtgtgaaaaggtatcaatcatttgagaaatccaggccttccacagtctgccccatccctgacctgcggcctgttgtttgtaatgaatcttggggtctttctcaccagcctggataatctcacaccctatcaacaccccagctctaggcagccacaaccagttagtgggaatcctggctgggtgcagtggctcacgcctataatcccagcactttgggaggctgaggtgggcggatcactttaggtcaggagttcaagaccatcctgaccaacatggggaaaccccatctctactaaaaataaaaaaaattagctgggcatggtggcatgcgcctggaatcccagctacttgagaagctgaggcaggagaattgcttgagtcagggaggtggaggtgatctgagatcttgccactgcactccagcctgggcggcagagcaagactctgtctcaaaaaaaaaaagaaagaaaagaaaaaagggaattctcatagcctaatctttctagtatctcaatatgttaagtgaatggatgcttatacactcattcattcatccattcaggaataaatagatgaacatgagaccactgtatcctgtttgttcccccaagtcactctcagcctcctagttctttggtctgctctagggagctggagaaggagggggatggaagggccggcactggctgccctgggctcacctagtgtcctgggcagaggaggcagaagtgacagagcacaggtgagctggttcatcctagcattatagactctccaaggccatcacctgggagccaggaacacgggacagtgaagacctgcctgacccctcatcctcctctgtcctcagtctccgtccctggtcccactctctcttgaaatgactgttgttgatcatccatttccattctgagagtacagaagattttcctatccaaacttacctcccctcctttcttcccctccagcagcggacagccttctatctctttcttcacactcttgttagaatgccgttcaccaccttgcatttcactttcagctaaatctcgtaagggcagatactggttcattggccctgaatcttgaagttaatatagatatttcataatttggttatctggtgataatattcagctttcattgctgtaaaacatcaatgcactatttcaaaatatacaaaaaatgtggtcactgtgtgtactctgcttcatttcgtcctgtctcccttctttctgcactgatagggctcattttggaaggctttggtctgtaagactttctaagtaattttcaagcatgattcagaatggaactattaaatactgtttcccttcccttaccatcacatacccagtttcttctaaatgcctgaaacagaacttacatttccataaaaaggaaaatcacatgagaagcatatgggttaaatataaaataagttttttaaaaaattccaaaagaacccaatgtagcctgggtagtttgagtgtatttgtgtatatttttagttctcttccttggaagaaaatctacattacaatttggtggtattatttggcatagttcttgtgatttaatattcatgtgttaggcattttaaacaacataataagcttttgagaagaaaggtatgcattgtcttgcttaaaaatgtaaattctgtcagggattgtgttcttagaactaagtttgttctttctgcctgagaaatgcagattccacggagcctgctatgtcaagcatggacaaagtagaagcatcattctgattatgatgggaaacatcactgattcattgtttctgttgacttacttgctatttttaacactctcaagttacctgaacatttttctggttaagtcacattaaatattaatgttaagtcaactaatccattctttttttttaagttttttttgagacagggtttggctctattacccaggctggagagcagtggcacgatcttggctcattgcagcctccgtcccccaggctcaatccatcctcccatctcagcctcccgagtagctgggacaacaggcctgtaccaccacaccctgctaatttttgtgtgtgtgtttttttttttttagagactgagtttcgtcatgctgcccaggctagtctcgaactcctgagctcaaacggatccacacacctaggcctcccaaggtgtatagtcccagccactcaggaggctgaggtgggaggacagccaagcccaggaggtcaggactgcagtgagctgtgttcacgccactgcactccagcctgagcgattaagcaagaccctttctcaaagaaacaaaaacaaatgtctgattatgaagcttgtaccctaacccactgcactgtctgggattacaggtgtgaccctctgcaccctgccaactaatccatcttaactgttggaaacacttccaaattcccatatttaataaaaatccccatgtcattctggctttcaaatcatacttttgggtagccttcaaatttcatcagtcatattgtgttcagggacctgtaagattggttcgatagcctgaaggttacagttttgtcagtgatattatagacgttagtcactgggtgctgagtgttttgtgtgtattatcttcttattcctcacagaaattctatgggacaagttcctcgcccaggatcatacagctagtaagcgacaaagccatggttcaagtatctgattgcaggccagggcacagtggctcccacctgtaaccccagcactttgggaagccaaggtgggaggatctcttgaacccaggagttcaggaccagcctgggcaacatagacctcttctctacaaaaatttaaaaaaaattagccagatgtggtagcatgtacctgtagtcccagccactcgggaggctgaggtgggatgatcacctgagcccagaaggtcagggctgcagtgcaaccttaaaccaccgcactgtctcctcttaagtcagtgcaagtgatgctgatttcatttatttactgtgtcttggagaatcctcagtgtgtcacagaatagggacaagcacagtcctggcatcattggctactctggctgagggagaggcagtagccaggcctggcctggcccagagggttccacaggagggacagtaggatgcacagtgcgtgatggtcccctggttatggtgagacccctctcttctgccagttgtcttgggatgttactattttcactatcactttctcttgtggggagagccttttcttccacatgcttcaaactttatcttttttttttttttttttggcaagcaaaataaatgtcaaataaaggtcagaggcagcctcgaaggggaacactgtcagaaagggatcccgaggagaggaggcaagaggggagggacaaggcctggtttggcttaatggactaacaatgcctataaaaaacctctggtcttcatgtttttaatgtagactattttttagagcagttttagcttcataggaaaattgaggggcaggtacagagatttcctatatacctcctgccccccacacatgcacagcctcccccactagagtggtacatttgctgcacttgacgagcgcatattgacacattggggtccactctttgtgttgtacgttctatgggtttggaccaatgtatcctggcatgcatccaccatgatagtctcctacagggtagtttcactgccctacaaatcctctgtgctctactcaccccttcctctctctgaacttctggcaactactgatctttctactgtctccatagtttttcctggtccagaatgccatagagttggaatcatacattctatagccttttcagattggctttgtttacttagcattatgaatctaagtttcctccatgtcttttcatggcttgatagctcttttctttttttattttttcagacggagtctcattctgtcacccaggctggagtgcagtggcgtgatcttggctcactgcaggccccgcctccgggttcatgccattctcctgcctcagcctcccgagtagctgggactacaggcgcctgccaccatgcccagcaaattttttgtatttttttagtagagacggggtttcactgtgttagccaagatggtctccatctcctgaccttgagagtcgcccgcctcggcctcccaaagtgctgggattataggcgtgagccaccgtgcctggccagctcttttctttttaacactaaataatattccattgtgtggaggacatgggggatttgtttatcccttcatttactgaaggactcttggctgcttccaagttttggcaattatgactacagctgctgtaaacatctgtgtgcagatttttgtgtggacataagttttcaacttctttgggtaaataccaaagagtatgattgctggatcatatgataactgtatgttcagttttgtaagaagtcatcaaactgtcttccaaagcagctgtacccttttgcattcccactagccaagaataagagttcctgccacccacccccatgctcgccagcatttggtgttgtcagtgttctggatctgagccattctaataggtgtgtagtggtgtctcactgttgcataaattctcacttccctaatgacatatgatgtggagcatcttttcatatgcctgtttgccatctggatatctttggtgaggtgtctgttaaggccttgggtccattttttaatcgggttatttgttttcttattgttgagttttaagagttccttgtttattttgggaaatagtcctttgtcagatgtggcttttgcagatattttcttccagtctgcggcttgtttcttcattctcttaagcctcggatctttttaggccatcttgggtaagcctcatctgaaccatccctccccttttcatactcccttactagccaccagcaagggagaggtccctgctaactgcagaggtccccgttgagtttctaggcattcagtgggaagagttaccctcctgggatacgtatcaactgcagaaaccatgagaaccatgttgaaaaggagacccacagcacccacctgattatacagctgccaacatggtgacctattgatgtcaccatcgcagatcagatgtgagctctctgatgtgaacaactaatctgttctgcaatacagaaagcaaatgttaaggaattcttacttttagcaaggacagttcaggactgaggtatctattagataaggatattaccaactaattctaagccttgatctactctcatgctacattcaactcacagcagacttgcgtgatgagaaatgagactgtggggtttaatgtagaattatatagatgagtgttgtaaccgaagacaatcatatgattgaggacttcggcagagcaaacagaagttggttagatttccagagaaagtgccctttcagtctttaagacgcattgagatcctctaacaagacagggatggaaagataatactactcttcagtgtatttcatgaatctctgtgtccttgggagttccgtgagcacggatattactttctgggaggaggaatgccaccattgcacctgtgactgactctttgctatttccctagcattttcaaatctatcatcttgtttgacccttatgctatcctgctgaatattcatgtgctcatttgttcatttatttaacaaatgtgtattattaatatttgcttgctctacgcagttgcacactgccaggccagcacagcttgatacagattgggagagttaggtggtttgttccaaattctcaccactagtgagagccaagtctcaggacaagacccaagagcttctagactcctattctctgccccacatttctgcccctcctgaattcaggcagccattaatgcctccatccctctagctaccacttattcacctctgctcttcagagactgaaacaccacaatgacattgatgtcattagattgctttccggtgaatctggattatgacgtgccatggaaaaagaaggctgtttggcagttttcatccttgaacagtgtcagtcggtaaaggggaaaaaaaccaatcacagaaacctggcgtgctcacgtgcagagcacctgcaagctggtgtttgtgatgcagccaacctggcctggagagagggcttagtcaattctgtatggagagtgttgcttctgttactgttattattgtagtaggtactcaatctatctccactcaacccacagattaacccacacccgcccaggaagctgactgaagcccatagcacactgattattcacaactcttgggtcactctggaatacccagacccttctgctgccacctgctgaatggccatgttttctaaagtccatgggtgctcccagttctgtgagtgtgagctgatcttgtcattcaaaacattaactattacgttaactggcaagaaaaaatgagtttgataatcatgattatttctatgaaaactactgaatactttgggatgattcggggaatgaattgctaaaacctttttggtattgaagttgaggtgaatgacacaaccgtgaaaggtggaaggaagaaaactctagaaggctcctgcacttagactgctttttggcaagtgacttttggttctctttccacgttaaagaacccaaaactagaaattgtaggtaaagcattcaagatacaattggtacaatcagtagacccattcgcaaaggacaggcccgttttccatcagaaagttggtgttttgcagcaaggggtgggtggcttgaacatgagggaaacatatcacaggatcagtattttagaagcataagtggagagcttctacaactcagttttactgaatatttagtagagaaaatctgattagcaaacacttctgtaatattgaaaaatgtccaacttataagatgtcacttccgaaaacggtagtgctagattagagcctcagtggggaaagttcccagagtaatgctcctaagagttgcccgcgccttcaggactggtgacataactgacatagcccagtggaaaatgaaaaattttccccttttgcaaaaattaataagaatttcatgatgacagcaaagcatttaacccagcgtggagctcttcagagcataagaccttgtgcggctgcacaggcccatggcgaccactctgctgccacttaagaattgccacgtattgtgtgattggcacatcagtataacttttttaaaaaaggtttagtctctatcagtttactatatctcacaagagtcaccatgcatggatagacttgaccaatggttgtttttgtcattaattttaggtttgttaaagaaacacttgaagaataaacttgttttagaatctcctaaatctttctaggtaactgtcctttacatcttaacggtcaggaatttttttttttttttttttttgagagagtctcactctgtcgcccaggctggagtgcagtggcatgatctcggctcactgcaagctccgcctcctgggttcacgccattctcctgcctcagcctcccgagtagctgggactacaggcgcctgccaccacacccagctaattttttttatttttagtagagaccaggtttcaccgtgttaaccaggatggtctcgatctcctgacctcgtgatccacccgcctcggcctcccaaagtactgggattacaggcgtgagccactgcgcccagccaatggtcaggaatttaaaggcctagtttttgcccttccacaagcctcacggccttccaaaaataatattctttttttttttttttgagatgggggtcactctgtcacccaggctggagtgcagtggcatgatcacagatcactggagcctcagcatctctgggctcaggtgatcctcccacctcagcctcccaagtagctgtgactacaagcgtgtgccaccacacccaactaacttttttgtatttttcatagaggcagggtttcaccatgttgcccaggctggtctccaactcctgggcttaagcattcacccacttcggcctcccaaaatgccaggattacaggtgtcagccaccgcgcttagttccccaacaataatattcttggttcagtccatgaaacaaaggattctgaaatgtttagatattctacttaggcaaaagggtttgaggtccatctgaaaaaagaaaacaaaaatgaatataggtcctatagaatatttaggttatcagtatcaaagatactgtttgccatggagcaatggcatggaatgaaattctcaagatgaaagactttacacaaaccataggttttacctggattcagactcatcagaggttctcacaagaaagaagtaaacaacaatggattcatgatgatctgttgaaaaataaaatttaaaatggcagagaaataatatataccatgacataagcagataaatcagtgaggaggataaagaagagatgagaacgaattcaaaaccataaatccatcatacagtggctggagatatcctctgtgcagttttacgtgatactgaagagcaacagaaccagcaggcgatgatgtcgtagtgagaacacctcatgatggatggttttgcatttaatctcatctcttctttattctcttcatagacttatctgtttgtgtcatggtgtatattaaaactagaggaactaggtcaagaataatcatacgactaagcaactttaaattgcttattttattaaataaacatggtatgtttttaatcagaatagaattttcattgtatgtgctttttttaaaaaattgaatgtcccattccatgtactttttagttttcactttgactttttctattaaccaagtagtgatttctctaggaggacttaactgtgttgctacgcctacttctgttgctgctacggtagaagcctttttatcagcccctggtcagcagttgctgagttacttaaaaatgtcatcttacaagttcatctcttaaatatttttttacttaaaacatataccttatagttgacacactgattattttatagtataagtctgtatgtactggctgattatagtttcctgagtcctttttttttttttttttttttttttgagagagtcttgcactccacccaggctgggtgcagtggcgcgatcttgactcactgcaacctccgcctcctgggttcaagcacttctcctacctcagcctcctaagtagctgggattgcaggtgcccaccactatgctgagctactttttgtatttttagtagaaacggggtttcgccatattggccaggctggtcttgaactcctgaccccaggtgatctactcgcctcggcctcccaaagtgctgggattacaggcgtgagccaccgcgcccggcctcctgagccctttttacattaaccacaccaccttaatttccagtttcgatttcttcaatgtgaaatgagaaattacagatatttgagagcaaaatccttctggagttttattatttccttttcctattctttttcttcctttctcacttctctgtggccctgggaactgtctcattgtcatatttgtgttctagaatattttgagtgataatgtcggtgctgtgtgttttgttttggttttctgcggggggagtggaaccagcttgcttctgtgccgccattttgaaaccagaagtccttcctttttctttcttttttcttagtttccttgcctacaccaccacaccagttgaacagtttgtggtgattgtttcattttgtttgtatgtttgtttgtttgtttgtttgttaacttttatttgggtccttgcaaagcattcactttagttttcatagaaacatttcccattttttctcactaatatttcactgctttacctaatatgtaattaaatttcctgatgagtttatctggtgacaacagacttgagaagtaacttggtaagtggtgggagcagaagggcgtagatacagtggtgagcagaccctcactggagtacgctgcatgcctggcaatgtgtggagagggggtggagaaggtgctgggtaggtggtaaacaggaatgccaacgggcctccctcatgctaattgggggttcttagacaagtcctgccactgcccatcttgaaggacatcccacacaactgcccatgggagaaacagcatgaggcacagacctccttccaggactttggatttgttgctcatacttgaaatccttgtgtcttcatgggcttttccttgtgttttggtcttggcttctctagaggttacccagtgggtcaggggaaggctcctcaaaggaatttcctacatgcgtatcggtattttagtcaggccatccaaaacatgccttccaaattcgaggaaaatctcgtgtggagtggtaacaaaaacttcattttatttgtatgaattattactaagctgagtcacaatggagaagaaaaaggggtgaatcgtgaggagccattttgacattcctggcccctgatcaaatggaaggattctgtttgtgatgctgagtgttggggtgtttctagatctgcttggtttgtggcactttcctagaccaaagtctaggaaatttctgtctttaaaatggaagaatcgtaagagctagcaggttgcctaacatttgttggactttgtttgtttttcaaaaggcccgttgctgaaagactggccacatctagtcacccacaaagcaatgatgctagaaccccttagggacaaaacacccttcagagttcagaagggaaaagtgatttataggactttttttttctattttagttttgtgaatctgttttgtttccgggagtaattttaatgttaaggaagtggattaatctctactgaaagctgagcccacgtggccccatgatcctccagggctgagttgttagggaccatgaggaaccaaggcacccacggtgatggggcctcagatgtgagtccagagaggagagcagactgaggtctccttccttagctgtgcttgttctgtgttgaacacacacacacacacacacacacacacacacaaatacacatacactctctctctcttttgtaacatctgaatcttgtctgtgattctgtaatcttggtgtgctctcttgccagtatcccagagtcccacctcacaagcaaatggtaaagcatgagtctgcccctaggcttgctcgtttctcatctcttcctctcccctccttttctgttcctcctctcctcctcctcctcttcctctcctcctccttttcctcccctcctcctttcctgttcctcctctcctcctcctcctcttcccctcctttacctcccctcctcctctcctcctcctcttcctcccctcctcctccccccttcttgttcctctctccttcctcttcctccaccctttctttcctctcctcctcctcttcctagccctctcctcccccttcccccctccctcctccactccttttcctcctctcttcctctccccgcctcttctctttacttcttttgtcttttttctcttccattcctcttttctctgccccgccttcctccgcctcagtgggcctggagggttacagtgtggttccctgtggccccgggctgtgggaatccggggagccgccctccactccccggaaccttcctctcggcagaccctgcctccgggcgctgactcaccctccccgtgttctcccttcctctccccgcaggaaatgtgactggaaacagtaactccacgttcatctccagcgggcaggtgatgaacttcaagggcgacatcatcgtggtctacgtcagccagacctcgcaggagggcgcggcggcggctgcggagcccatgggccgcccggtgcaggaggagaccctggcgcgccgagactccttcgcggggaacggcccgcgcttcccggacccgtgcggcggccccgaggggctgcgggagccggagaaggcctcgaggccggtgcaggagcaaggcggggccaaggcttgagcgccccccatggctgggagcccgaagctcggagccagggctcgcgagggcagcaccgcagcctctgccccagccccggccacccagggatcgatcggtacagtcgaggaagaccacccggcattctctgcccactttgccttccaggaaatgggcttttcaggaagtgaattgatgaggactgtccccatgcccacggatgctcagcagcccgccgcactggggcagatgtctcccctgccactcctcaaactcgcagcagtaatttgtggcactatgacagctatttttatgactatcctgttctgtgggggggggggtctgttttccccccatatttgtattccttttcataacttttcttgatatctttcctccctcttttttaatgtaaaggttttctcaaaaattctcctaaaggtgagggtctctttcttttctcttttccttttttttttctttttttggcaacctggctctggcccaggctagagtgcagtggtgcgattatagcccggtgcagcctctaactcctgggctcaagcaatccaagtgatcctcccacctcaaccttcggagtagctgggatcacagctgcaggccacgcccagcttcctccccccgactccccccccagagacacggtcccaccatgttacccagcctggtctcaaactccccagctaaagcagtcctccagcctcggcctcccaaagtactgggattacaggcgtgagcccccacgctggcctgctttacgtattttcttttgtgcccctgctcacagtgttttagagatggctttcccagtgtgtgttcattgtaaacacttttgggaaagggctaaacatgtgaggcctggagatagttgctaagttgctaggaacatgtggtgggactttcatattctgaaaaatgttctatattctcatttttctaaaagaaagaaaaaaggaaacccgatttatttctcctgaatctttttaagtttgtgtcgttccttaagcagaactaagctcagtatgtgaccttacccgctaggtggttaatttatccatgctggcagaggcactcaggtacttggtaagcaaatttctaaaactccaagttgctgcagcttggcattcttcttattctagaggtctctctggaaaagatggagaaaatgaacaggacatggggctcctggaaagaaagggcccgggaagttcaaggaagaataaagttgaaattttaatttgcattttttttgtctagataagaatagcgtgaatagatcctcttttattcgtaaataatcgtgcatctgtgggttagccttgtagaagtggaaaacattccattttccaatgcatttaaatgtaaagccaaatctgcatgttgtgaatttaagaaaacttattatcctaaaggtgcctttctcttggcatcatcccgcttgtgagaagcctagaggacgctccaggtggaaggaaatcccctgggtggttttatcttttgttacccagtgagcactggttccccgcaaatactggggaaaagcaaaaatacacaagcaagttaaaattaattttgcacatctgggaggttataaaagaaagcactaatagtagtcactgcccagactttactggccacaaatgcccagctgaagagcatgactgtggatcactggtttttccctcctgctggaaatgctggggtggtagcggtcgattaggattttcagtggagaagcacaggacagttctgtaatttatgggactccttagccaacataaagaactgcaggaaataactgcacagccaggaggatccgttggtgggaatttaccgtcattcctgcccttttatttaacatcatccacagagagatgttatacaaatggaggaaaccattataccttttgatatggaatatattacagagttacagttcacaaagtagaatgctgagctgaaaacccgagtttctgctgtgactgtcatctcactgagcacttcgcttttctttgcttttattttttccttctataaaaaggcaataatgataatttataatagtttccctacccagagatattagaagtatgctacagtgaatgttaaagtaccttgagatccttaaatcaaaggtgctatatacataagtaagactctactttcagaaaaaggtaatattatttcctgcactgatccctactaattctatattgatccaaaggcaactcaatgctaaaaaatgtatagaaaatataagtctgtgtctgtgtactgtagagatgtatgtgacaagtgtaaacaaaatgaactgaagcagtaatgaacagttattagggggaacatgataaagagattatattaagcttatgtttcaccataaaatcctttttatggcttactaaaaccgagctcactgtaaaatcatgatccaacttattgctaatctttatgatatgcttattcctaatctttatggtatggtgtcaaccgttcatttgtatcttattgctcattccctggaccacagactagggacagaaaatacttgctttaataatatatatgctgttgatttcacaaaaatttattaaaatacagcctgggtacccagtgaaagagctgaaatgga

SEQ ID NO: 775 - DNA, 30203 bp, Homo sapiens
ttctgcaaatgggaggtactggaaagaacgtgagggcaggaggagagatatgccagggtatttattgccctagctccccctctgccagaccacaggtaagaaacgactgcatttctccacctaaattcctttcgagctgtccctcacccatcgctgcagtctgtattgttgctcctttgggcctcagggtagcgatgctctcccacatttctagtccctgagtgttttgtcatttcttattcactaccttagccttgctggcactttcataaacaatgtcttcattaaacccttcaatgaccacactgagtaacccatctgttttctgccgagaccctggctaatatagcatccatggggaaaaagggagggcagggattagaatttactacagaaaaaatacgaagagaaatactgaggcttctgacatacaaaattggattacatagaaaaacaaaagcctttgccaggcgtggtggctcaagcctgtaatcccagcactttgggaggctgaggcgggcagatcacaaggtcaggagttcgagaccagcctgaccaacatggtgaaaccccgtctctactaaaaatacaaaaacttagcagggtgtggtggcaggcactgtagtcccagctcctcaggaagctgaagcaggagaatcgcttaaaccctggaggcagaggttgcagtaagccgagatcgtgccactgcactccagcctgggcgatagagtgagactccatctaaaaaaatacaaataaaaataaaaaagaaaaacaaaagccttaaatacaggctatttaggttattgcttcagatttttctttagttaggcccgttgtcatttttccctattaaccagtgggtgggacattgtgaagaagactacatcagttagggagaaagaatatagaaatcacagtttctctgcacattcttagtcgaagtgtgatataaatctgtcaccactctcagggatgtgactaactaatttagaggattataggatggaatatttaattatgattacagcaaacgttaatgagtaaaagcttataacgtactgctaagtgaaaaagtagggcatgaaacgtatggtcattatgatctgtcaactatgttaaatatgtacacaaatatgcgtaggaaaaaaacttgtaagaaattcaccaaaatgtataaagagatgcctttagatggtggaattaggggcaggatttttttccttatatttttctgtattttctaatttttctgtaatgaacatgaattactttcgtaattataatttttcttttcttccattttttttaatgagagagggtcttgttctgttgcccaggctggagtgcagtggtgtgataacagctcactgcagcctcgacctcccagactcaaacaatcctcccaacttagcctcccaagtagttgggaccacaggtgcatgccaatacatgtggctaattttttaaaatatattttgtagagatgggtctccctatattgcccaggctggtggcaaactcttgggctcaagcgatccgcacacttcagcctcccaaagtgattacaagtgtgagccactatgcccagcctctttttcctttccggttttttttttttttttggcaggtcaattgttacacactccttagcagattcagactttcagacttacatggaacaccaacctgcttattttgttttttatttttgctttatttttttttctttttgaggcagggtctcactctgtcaccctggctggagtgcagtggtgagatctcggctcactgccacctccacctcccgggttcaagcaattctcctgcctcagtctcctgagtagctggcattacaggtgcacaccaccacgcccagctaatttttgtatttttagtagagacggggtttcaccacattggtcaggcttgtctcaaactcctggcctcaagtgatccatccacctcagcctccaaaagtgctgggattacaggcctgagccaccacacctagccttatgttgttttttaagaaaacacacacattatgttatgctcacgttatcagaaacaaatgagactgaccctggcaagtcccaaccaaggaatctgtctccagatatgccttggcctggttgactcttggagttaacccttcagaaagcaggaggcagagacccttctgatgagggctgcctctaggagtgggactgcttcagtggatccagctgaattgtcctgagcaactgttgtagagatatggggagtacttagtcttccagctgaggccaggttgggccactgtgcagtgggctgctggaagacaagttgagtccaaactagcccagttcttgaggagcaaccacgtgactctatcaccgtgatatgcacaggttgtgactggtgtcctcagactggaaaacacagtagtgccagctcaatcaggataggagagagacgtatacgttgacatttgtcttcctatccggatgagtgtggtcctgcctttgggcctttccttgggccctcccctctatgtgaaatgccatctctactagcgagattcctgtctgatttatttgtttaggtagaatagcaagaagtctacatcctgatgatcctgggcattgggagctcacctcaccttctctggactctggagggcacacacatatggtccctgctgggggatgcttcgcacacagaccgtcttccagaggcaggggcagggaaactgctgtcaggtgggtgttgggatctctttatatttagttttgttgtgctgtggttattgatgttgcggttttcagtttccttccctcgtagttactccccacctgggctagccactctctacccatcacaggcccaagtctgtgagaaggggcttctcttaggtcctcaccaaggccccttcccaaggtcccttcccaaggcccaacctgcccacagtctcaccgaggccagcagggcccaggtctgggcccaggtccagtcccaggcaagggtattgtgtgtgcttcctgataggtcaggccgccctgaaccctccaggcacactggccctaaatgtgtctgcttcctgaagggtcaggctgccctgaaccctccctgcgcttcctcttgtgaccagtgttgaagatcaagaggaagaggaagaggccaaaaattcttcacacagagccctgggctccgagcccctgtggcctgtcacttacctggtccacagcagaggtggtgtctctagatgagggtaatgggaagcatccttccctcatgccctgctcccttcctccgagccatacccattacactgagccagtcacggcagacatctaggcagaagggaccacaggggtggcctcgttgcctgtccttgctccctccacactgcatatctgcagtctaacctgctgaatcacagtccttgttaggtgagggccaggacaggagagaagacacttcacttgttgccactaccagtctttctataccctatctttgtattctgtctgcctggcctagtatggagcccactaggtcagcctttgaccaataccccacacagaagtatattttggttctgtttacattcttgtcagaaagcccgctattttaagtcagcgcctctcaaacgtgaatgcgcataaggatcacccagggatcttgccacagcctaagtcctgatttgggagttctaggtcaggacattctgcatttctaacaagctcctgatactgcaaagatggaagggacccaggcttatttctaggctcagatgaggtcttgcttgttctgtgaagattatcagagtgctgatgtcagaattaatcacttcatccatcatttcctgaacacctggctcagccgttgtcccaggtgccagcacagtctgcccacatctgctccctgactagtctgggggctactgggacacgtagtctttgtagccgtactccctagcatggaggatgctcagcagtttgtttgagcaaattaatgaacaaattaatggcatttgaaggtgatttgcaaaaggtataggttattaatatgtacatatatattttgagatggagtgtcactgtgtcacccaggctgtagtacagtggcacaatctcagctcactgcaacctccgcctcccaggttcaagcaattcttctgcctcagcctcctgagtagctgggactacaggcacgcaccaccatgcctggctaatttttttgtatttttagtagagacgggatttccccatgttggccaggctggaaggttgttaatatttaagacatttcctaaaccgtgttccctgggacaccaattctgacaccaattcagagggatgttaacagatatttgttaaatgtggtgggggaagtgggaagcttttgtaatcacttaatccaagaaatgctggatgaaaaatagactcctgaaaagcttctcacagcctttaataaactagtggtcagtgccagtgtcccagagagagatccagtgagcagcatttcgctcacttcgttgaccatagagaatacctcttgagaagcaccttgcggggctaggatgccgaggaacagaggtgaggggcacagtgagcactctagtgttcactcgagtcttggagataattaagttacaaaggtctagagaattaatagacacttgatgaggggagagggatgtcagaactgaaaagcagaggaggatgtttctttcacagactgagtcgtcccactttggagttttgttttgttttgttttgggggttttttgtttgtttgtttttgagattttgttttgtttggggggtggtggttgttcgtttgtttgtttttaagatggagtctcgctctgtcacccaggctggagtgcaatgacacgatctcggctcactgcaacctccgcctcccgggttcaagcaattctcctgcctcagcctcccaagtagcccgccaccacgcccggctaatttgtgtttttagtagagacggggtttcaccgtgttggccaggctggtctcaaactctcaacctctggtgatctgcctgcctcggcttcccaaagtgctgggattacaggtatgagccaccacgccccacttctttggagttcttatcacactgctgtggggctctctctgctcttctgggttcctctgggaggggagcacaggagaaattctgactctgtcttcctcctctgacctctgcagtggctgagagggggaggttaggaaacctagagagaagcgaacatggaagcctgttgatgctcagtctgctaaaagacaaaggactccagaaagtatctggagataaagtgtctccaggaggagctttattccagctagaaagcaggggaggatgtttttttaaagggccatgtaatacaagtctatagccgagattgggattgaaatgaactgattaaaagaaaggaaacatctagaaaaagaccccagtgaatcccagacttcatttatcttaaaacagtcattctcagctggagtgaattttggtctcccattggacatttgacaaggtctggggacatttttggttgtcacaactgaaaagaggtgctactggcatctagtgggtagtagccagagatgctgccaaacctcctacaaggcacagggcagccccttacaacaaagaattattaggtcccaaatgtcagtagtgtcaccattgagaaactttgccttaaaagttgtttttaaatatcagctttaatttacaatttacaatggtgcacaaattcagttgctataccacaaaaaaattgagagaaatttattcagtataaaaaaatccagattaacaatttggtcacctcctttgagaatgaaaaaaaaaaaaaaaaggacatccaaatcttagtcagcaatactattttgtaaatttaaaacacatctcaaacaacacttgctattttgcaaagagagaagtaaaaggattcacagcaaatattccctttaatttaaaagtttaggacattgcttaaatatacttaataacttttagcatgaagattttgaaggaaattttttatgatgcatctttttatttgtaaaaattgtaaaaatttatggggtacatgtgaaatctcgttacatatatatataatgcatagtgatcaagtcaaggtatttaggctgtccatcacccaagtacagtacatttttgtttaactatagtcaccctactctgctatcaagcaatgaatgtattccttctatctaactgtttgtacactttaacccacttctcttcatccttccccatctcttccattcattcttctcagtctctgttctccgtatttcctctctttacctcaatgtaatcacattttttttggctcccacatatgtgagaacatgctacgtttgtctttttgggactggcttatttcacccaagataatgaccaattctggaggaaatgtattaagtagaaggggataaaatgctacaaataaataaatattatgagtagggatggggaggatcccactactggctatataattaaagagattctcacacaactccataaagagacatgtaagaggatttttttttttttttgagacaaagtttcgctcttgttgcccaggctgaagtgcaatggtgcgatctcggctcaccgcaacctccacctcgtgggttcaagcgattctcctgcctcaacctcccaagtagctgagattataggtatgcaccaccatgcccggctaattttgtgtttttagtagagacagggtttctccatgttggtcaggctggtctcgaactcccgacctcaggtgattcacccgcctcggccttccaaagtctggggggggtggattataggcgtgaactactgtgcctggccataagaggatattttatcaccaagttatttgtgatggctggagagctggatgcaatgaggcattcatcattggggaaatgaatgtaagtaaaatgtgacataagcacactacagaatattctaccacagtaacaagcaatgaattagatacacacaaaaggtcaagaaatctttaaaacatggttctgtccagttgcagtggctcaagcctgtaatcccaacactttgggaggctgagacagaagggttgcttgagcccaggagtatgaaaccagcctgagcaagatggtgagaccctgtctctacaaaaaacaaataaacaagagcaaaaaacgccaaaactccacaatgctgaatgggggaaaaaagaagaaaggaacagaaggaggcctccagcacaatattattttttgaaatgaaaaatacccacaaaacaatgccacatgcttttgagaacacttgcaaatagaatgatttatgagtcttagtcactgcataaactttacagttgaactcttggaaattacgcatcagtgccacctggtggtagcacttcaaatttgtggcataattcagttttgtttttaacaagataacatttacatacaatgaaatgcacagatcttcatttgatgatttttcgacaactgtataccccagtgtaatccctactctaaataatatatacggtatttccactgccccagaaggttccctcctactctccccatgccctaccctgaaagcaacaactgatccgcctctgtcaccacaattagcttcccctgttgtagaacttacatatgtggaattatacagaattatacagtgcatactcttttgtgtttgccttctttcaggaatcataatgttttagcgattcagtcatgttgtagcacgtatcaatagttaattcacttttattgccaggtggtattctattgcatagctgtattccagttggtctatctgtgcaccaactgactgacatttggatcatttccacttattgcctaatacaaataaagcttctatgaatatttacgaataaggctttgtgtagacatatgctttttatttactgtggatggaattgcaaggtcatagcatggatagatgtgtaatttttttaattgcgaaaaacaattctccaaataagttgtatcattttacacatccaccaacaatgtatttgtatcagcaataaaaagatgaacaacccagcttatctaaataggcaaaaagtcgtgaatcaacattcggagatatataagtagctatatagtacaggaaaaagtgcccaccattattagttttcaggaaaatgcaagctaaaaccacaatgagatatcactttacactcactagaatgttaaaatgttgagaatgtggagaaattggaggcaattggaaatcacacacacacacacacacacacacacacacacacacaccccagctctctcaggtcaccagctcaattccttcacaaaagaaggattcagcttgtgacttgcacatttctgcataggctactgttggtcaagcctggaaagttaaaaaggcggaaagacaaatctgctgctgtgcattggtggcgtggagccacaggagtgccagaggcgtatactggggcaggctcttatacctgttttttactgcagttcttcattcagtagggaaagctttcataggggtctattagtagaggttggccctgacccttctaaggagaataagagtgtcctgaagtcaaaatgaatgaaagccaggtgaagagatgggcaggtttccatgggccccgcattgcctggagctgcccagaacatggggctggctgtagcttcaccacccaacttctctcttccctcttcctctttctgtttctcctcacctctctcttcctccttttcataacggcatcatgtattaagttttgttatgagccaggcgtttaatttttttttttttggagacagagtcttactctgtcaccgaggctagagcgcggtgacgcaatctcagctcactgcaacctccccttccggagttcaagcgattctcctgcctcagcctcctgagtagctgggattacaggcacccgccaccatgccaggctaatgtttttttgtatttttagtagagacgaggtttcaccatgttggctaggctggtttcgaactcctgacctcaagtgatatgcccgccttggcctcccaaagtgctaagattacaggtgtgagccaccgcacccagccctaatatatactttttaatacaacacttcaaggtaggcgttattattgttgttgttgtcatttttgagacagggtctcactctgtaggccaggcagaagtgcagtggtgctaactgcagcctccacctccaggctcaatcgatcctcccacctcagccacccaaatacctgggactagaggcgtgtgctaccatgcctggctaattttacaattttttgtcaagacgagatctcgctatattgcccaggctgatcacaaactcctgggatcgagcaatcctctcacttcagcctcccaaaaatgctgggattataggcatgagccacggcaccctcaccccatgagggaatgtgggctctccggttaaggaatttgcttgaggtcacagaacttgtggattcacaccccatggctgcagtcacaaattaccacaaacgcagaggcttcaaacaacatcaatgcattctgttccactcgggggtcagagtcagaaatggggcacaggcttgctctccctctgggggccctacgggagaaaacgtcccttgcccttgccagcttcttaaggctgcctctaaccctgggatccaggcctgcatcaccccccactctgctttcatcatcacagctccttctttgactctccctcctccctcttatgagaactttatggcccaagctcacccaggtaacccaggataacctccccatttcaggatccttcctttgatcacagatgcagaatcccttttgtcatgtgaggtaacatattcacaggtttgggggataaggaggtaggtatttggggggatgggagcatcggtctgcctatcacagtgagtgagtggccaaatgagggttcaaacccggttctgtcgtattcctgaatctgggatctttctccaaaccacactgccccttccttcagtccttcctgtccttggagctgtcctgggttcccagcaagcacagattctcagaaagggacagcagaagaccctaaggctggacatatcaggatatcacatatcctggtgagagtccaaagacttcttttcaaatctgggagggaagaggagagacggcaggagactccatgcccataccccattcaccataaagggagggggaggttggccttgagggccagacaggagaggttctgcaaagggagcagtgtaccctctgaacaatgccgaggacagcacaggtactatgtgaatgttggtgaggagggtgcaggttgctggggtcggtggtgggatgagtagcagtattttggaccccgtgtctaaattcagcctggtcatagatactgccagtggctgtgtctgggaagatgccaagctggggtcacatgggtcctgcctgctgaacctataagtgccgtggggcatgtgtggcagctcctcccaccttctgcctggaccccctggaatgactgccttttggagagggtctatattcagggacctctagaccttagctgggcccagatgcaaggaggttccacctgtggtccacactcgactattttggcaacttcctgccaaggctggaccacagaattttccacgaaactcacttcaaattgtgcggctctttcagctcctgctatttcagttactgggccaggatgggcttctgggtgtatgtatttaaaaccagaatctatggtgggcagaggaatctggtaagagtctgagatttaaaatcagatattgttttgaatgccggctctgccacttacaatgctggaaacttcgaacttgtcatttaatctttctgagccttaattttctcgtctgtaaaatagatagaattataaggccaggttaagaggctaagagggggaactccttgtgcggatctaaggacccctcctcgaggctgggaagaaagaggtgggcaggagaccctgggcaggggaccatgcccagatcacacccaccacagggagagggcagcagagatcttcgggcagcttgagggtcaggtggagacaatcaccagggaggggcagacaagccctgaggcctcacctgtcaacgcactgactcacctcaaatatttactgggcgcctttgagcatgagaactagacctctcccttgcctgccttggaccagtgcccatgggcatgttgaaagcacctgcctggaagagagtctgccttaagagggtgggtaccaaccagggccaccttggatatggaaaagaaacatcatgaaaaggaaagaatttccagggctcctggaaccgactgaagactttagccttttgggctctgaggctgtgccatttgccaggctccaaaatcgctaatcattttatcctgttcctttggcaacaatagggtacatgtgacctcagcccggcccatcacagatgcccaatttccaggccacattgattggttcaagagatgagcacatgacttacccaacccaatcagagtctcctcttgggtttttatacactgaaggaggctgtggggagaggagaaaagtcccttctgttcctttagttcacaaagttgggaaaagcggtctgcagccatacctccccatccctaatagcaaacagtaagcctgtctataagtgggagagcatgatgacagcccccccaaagaaaagtatgagagtgggagattgtgaacaaaactctggttctccccagcacaccccaggatcctttgggcaggttgcatggcctctgaactttgctgctggataccttacctgcccccactccagttaagtgcacactacagggcccatggaatctaaggggaatggcaccccctggagatgaacagaacacattccacacaaccacatgaagtagccctgattacaggtgagcaactgaggctcagaggtgcaatgacacacccaaggtcacacagacaaggtgtccagactccagagcccaggttctgatggcatggctgcctcctggcccacccctggcacagcccagaagggaggcagcactcaggactccaacatgagtctgggagctgttactctggacaacggcacccctgtgtccaggagccatcaggaggcccttgttgggccagctttatgaagccctgggctcttgtgagcgaattcatcgtacaagtgaaagatcagcatgtggccatggtgaaaccctgtctctacttaaaatacaaaaattagctgggtgtggtggtgcgcgtctataatcccagctactcgggaggctgaggtgggagaatcccttgaacccgggaggcggaggttgcagtgagctgagatcgtgccactgcactccagcctgtgcaacagagcaaaactctgtctcaaaacaaaacaaaacaaagtaagcatgtggggaaggtttagtaacatctgtggcttttgtctgaccagcaacattcctcctttcggtaatagaatcccaggttttctttggagacctacttaccttcattggatacaaataagggactgtccataaaaatgccttcccttccctggtcagaaagtagacatgggctgggcacagtgctcacatctataatgccagcactttgggaggatcacttgagcccaggagctcgagaacagcctgggcgacataagaagaccctgtctctacaaaataaaaataaaaaattagctgggcatggtgatgcatacctgtggttccagctacttgggaggctgaggagagaagatcgcttaagccaggaaggtcaaggctgcagtgagccgtgatctcaccactgcactccagcctgggcaacagagcaagaccttgtctctaaaacaaaaaccaaaaaaacggaatgtggacacataactctaggttttttgagcccagttcttttggggcatagttttttcagcttgtcacctagttttttgtgcagctgtggtagcaggcactgtcagtgtcccacccacactgtttaccactccccattcttgtgcatacctgcggcctccctgtgcaacccttgcaatcctttgcccggaggctttctctaggagcccagagacatgaaaggagctagccgatagtgccagggagttaatggtctctcttccagcagccctcaatcagcgactgttgggagttgctggatatataccccaattccttcacctctcagtggggataactctgccatgtgtgccacacagtgtcccagccatccctggttggattgaggcccagtttccccagtggtaacctcagcgatgcatacattattagttcccttccctgccttccttattcccactctcctgcaggtgtttcgtgggattgcctcccagaaaatgatttggaatctaatgtgcttttctcatggtctgcccctgagtccaacctaagacaataccacatccttctggaaaattattattctgctgaggtttgccaaaatctacttctgttgcttgcaacccaaggaccctatcaaaattcatagtggtctggagttgtgacatgttgcaccaggctgtgataatctgatttttctgaaggccatcagagctctggaacggaagggggtatcaagagactttgttctaagctcttttgtatgtatgctcagaggacttgagccactggttatgtccatgaatggaaatgtttggatggcacaaggtcccagaacaccaggtctcttgagcagccccactcctcgatgggtctgtatgataatcccttatggttggaggtgatcaagccaagagtccatgcaccaggagagaagataggcactgaaactgtttcctgtgagttcagcagatggtcttggggtagcttatggagacaaagcaccacactcaggtcttagaggagatactaagttcttaggtccccagccaggttggctaagagctagtagaaaatgtggtccttgaaatagagtgccacctctgttcccacctatatggacacagcataggatgtcactggctggacccagtggacccactagagtccagcttgtcctcagagcttcctcaagccctcagtccagcagaccaagcatctgaagctggcatccttactgtcctgagacttcatccagtgcaggatggattcaaatagtcaacacacacatgccaggccctgggcagagcactggggatatgaagtgacttaaatgtccccctgttcctctctttaaggaaatatgagagatagtcacataggcaagataaggtcatgaaacattacagctgctgctgggatagatgtctgtgcaaacatggtccccaaactggagtgggctgagggtctgagaggagagcccaaggggaggtaatagaggggcacgccaatcaggaagaacagcataagaaaaggcttggaggcgtaaaagcctgcaggtggttctatcggatggggtgaaggctcaagtggccagaggtgaagttagagaggccaacagaggaccagtcgtggcggaacttttatgtcatacaaaccaaggagcttggttttcatgcttgagtcattgtgattgagtaactttagttgaattgactatctgtaattgaataatattaggcagagggatgatgtggtcatttttgcattcagaaagatggctctggaagcagaatggattggaggaggtgagactggaggcagggaaacagcatgagtaatgaaggtgagagatcgcagaggctgaactaggggaaatatagaggaggtgatggatatgagaggtggtgaggaggtgaaatcagtaagacctggttcctggaatgtagaggtgaaggagaagctcaggatggtccccagattagcctaaggcagtggggtgatggtggtgctgtccacccaggtgggggaactgggaggtagggcagctctgggtggacagaagatggaaagttgacttttggacatattgagaagggggtccataggataatggggtggaaggaatatctctatttctatcacagctctcaccacagcattttatagattcctgctcaagagtccattccacctctccaccactggtgaactgcaagctccttgagtccaagtctcactcatctctggagtcccagggactggcatagtgattggtgccccacaacaggtgctcaataagtgtccattgaatggtagagtggatgcccccatggagggatgacttcagctcatttcatcactgagcattccttggagtcaaatcccaaaaaagtagatgaaacctctccttaaagtagtgtcctcccattgcctgccccctacagctctggaccaagtggaatgggcaggtgggctctagacctgggacatagagttgggtggctgaggggcccaggacaggctgtggagctggctcagtccagaccaggtctccctggaggggatgcccacacctgggtagctcacacaggtttccaggcaggtgggggcactttgggctggaggaagggtggagcaggatgtgagctggaggccagggaaggtggtcccagggcaaactggccatgctggccatgccatctggcagacccaagctctgctggagctcagctcccccaccttaagctaaacaaggcctctgtccccaccacccatcagcagaacccatgactcagacctgatggatccagcattgccgtcatcaaggagtggctgtttacctcaaggagctgggcaccaggccaatctaagcagatggcatgaaggctgctgggtgaggctggggagtgttggcccagccaaggcacaggacccaggttttcactctgacctggggcagaagatgcaggaattgcccagctttcctgcctgagccctgttttaggtcatctgtgtcctgattgtattgattccaggacctgtgcaggtgcccagggcatttaggtcttggcctctcctctgcctccaggaatccccacttaaaccctttccttggtatcacagcagctacacacatctcatctcacattctcctctccagggccctcacaggtgccctgggagtcaggctgctggtggtacaaattggtgaacccaacatgggagatggaagaacatgtgcaggcccaaagaggggaagggatgcacctaagctcacctaagaaactggtagctgggctgggagctgagtgtacaacgaggccctcacctcccgccactgacttccttgttctttccattctggctctactggactccttggtgttgtagctgccaaccctgttcccaagtcaaggcttttgcacttgcagttcctctgcttggcaggctcttcccctgccacctctgcaggactcgtttcttctctgctcatgtgctactattcaaagagaagcctctcctttgtcactctcctcttggccacttgatttctcttccacatcacatgtcatgtgtttattgttgtctttctttgttgtctatcaccccactagaacgtaagctccttaagacagggactttctccatcttatttatagctgaccccctggtgactcagaacagtgcacagaatatggtagatacttcataagtatttgttgaatgaacacacaaacccagattgcctcactcctggtccggagctctctcctgtacctctctatgtctcagagaagccagaggaggaaagagtgcaggaggggttggcttaggctggagggtggcagccttactcctttgccagagacacaacaggcactgtgacccaggccacacctcctggggcctgtgtgtatctgggggctctcttgggcactcacggcatcccaggggcatggagggatcagcacttacctcctcttttcccaaagcaggcaccatctctgcccttgggcccactgtgttcttcccgttcttggatctgtcacgcaacatttttttgagacagggtctcgctctgtcacccaggctggagtatagtggtgtgatcacagcttactgcagcttctacctcccaggctcaagcaatctttctgccttagcctccagaatagctggtactacaaggcacgtgccacactgcctggctaatttttaaaaaatttgtagagatggggtctcactacattgcccaggctggtctcaaactcctggcctcaagccatcctcctgccttagcctcccaaagtgctgggattacaggcatgagccaccatgcctagcctcaacacttattgagcacctactgtgtcccacgctcaggactgggcaccagggcaatagagataattgaaacattgtcctttttcccagacagcttgcagcttagtcagcagatggataagcaagggccaccaaagtgcagggggaagacacggatggaggagacagaaggcacaatgcgagtggggcattcagggtgggtgacaacagtcatgaccttgttggtgaaaggcagttaggaaggtttcagaagagggaatgtttaagctaggtttcacaggatgggagtagggggatagagaagggagacccagcattgccagcagacagaataaattgtgcaaggggttcagttgaactgaagaagtgcaggtccagggtggggcaaggtgaaggtgaagctggaaagatgggttgggatcagatgttgaaggggtgtggtcaccaggctaaggagtttgggcttcttcctgttggcagtggacgccattacagtgttttgggcaagatgacctggtcagctttgctctttaggacgcttgtccgggacgctgcgtgcagagtgatttggagtggcaggtggagagccagggatatgagacaggacaccattgaggtggccaggttggagacaacagtggccaggactagggtagagtggggggtgtggaggggcagggatggattcaagagctatgtaggaagcagaacctagaccctccatgggaaggcaaacaaggctgaggggtcagtgcctgggattccactgccggaggttgctgggatgtgggtcaggggagcagagatcaaggcttatttagcccccactgaccattccagactcctgtcatggccctccccggctccctggccccactttgcccacatggcttctctgttcttcagatgtgagaagcttcttcttgcctcagggctctcacacattctgtttcctctacctgcagcactgttccacttggctacagcctgccctgcccactcagcccttggcgtctctgatctcagatggataggtcactcttggatcctctcacagaacagagcatgtgtggttcatgggactcactccagcagtgatgatacaatgctgctgcccgttcagtactgtgcctctacttaaccaaagctcctggaggacaggaactgtatctgactcactctctgccatatccaagcactcagcatggagcatggcacttagccgcttgttaaacttttactgaatacatgaatggtgaattaatggtgaggttttcttggatgcactgacatccttaatgggctgttcaatagcagtcggatataggagctaggttcacactttgatgggatgacagattacgaagtttgttactatgagtgaatctagaaggtatttgtctgaagaggagaccttggggtgggctgggatggtaagtgagctcagtactccacaggctgcccttgactttactctgtactttgaaggatgcaaaattcaagcgtcctggctccttgcagcaactagaatgttcagtagccatttctgccacgtggatagaaatctaaggtccaaaacaaggaagggatcaaatccctttgctcccctctgtcccttcctcactgtaacctgggacactgacagacagacctgtcagtgatcagatgagaaatggagagaggcccaggagcttcacatgtgcaagggtaggaggcaggcagatggcagacctgctcagcctaaaggtgcttgtgcaagtacaggaggttcatgcaagtacaggaggccagagacaaagctataagccccaaggactctcagggaggcagacctcttgtgtgaggaaggactgtctttgttcgaagccatccaacaacgaaactggtaggtagtgagctccccatcaccatgaatgacctcccagtggggctgctgtaggaaagccctagtggaagaagggagatgaaacccagatgaccattattttttattttattattttatttatttatgtatctatttatttattttgagaccgtctggctccatcacccaggctggagtgcagtggcgcaatctcggctcacttcaacctccgcctccctagttcaagtaattctcctccctcagcctcccaagtaactgagattacaggcacacgccaccacacccagctaatttgtgtgtgtgtgtgtgtgtgtgtgtgtgtgtgtgtgtatttttagtagagatggggtttcaccatgtcagccagcctggtctcgaactcctgacctcaggtgatccatgcagcttggcctcccaaagtgctaggattacaggcgtgagccaccacaccaagcctatttttatttatttatttatttatttatttatttaggcagtttctcgctctgtcaccaggctggaatgcagtggcacaaccttggctcactgcaccctccacctcccaggttcaagcaattctcctgcctcagcctcctgagtagctgggattacaggtatgcgccaccacgcctggctaattttttgtatttttggtagagatgggtgtcaccatgttgaccagggctggtctcgaactcctgacctcaagtgaatgcacccgcctcagcctcctcccaaagtgctgggattacaggtgtgagccatggtgcctggccccaagatgacctttaaagtccaattccccttttataagatggcgtttttgctttaggacaggaagtcatcattaaatattttctctacctgcctaagcaatggaaagatagctgccacctgcctcagaggcatccctgggactgtgcagtttcctaaggaggaacggaaggatcttgaagctgagtcaaggatcactgggggcctcaagctagtcttggccacaggtctggggcttctatgggtctgtagaggtgactggatggctggtgtccccaaagggactgttctttttttaattaaaaaaaaaatttttttttagagttggggtcttgctatattgcccaggctggtctctaatttctgggctcaagcaatcctcctgcctcagcctcccaagtgttaggattacaggcatgagccaccgcacctggctggggctgtcctcaaacaagaatccttcgccttgtcattggaatattcttgcaacttatctgcaggcttgaaatctttcgaaataaagtttttctttaaaaaaaaaaaacacagattctgatttaaatatttcagagcgaagctcagcatctgtatttgtaaattctcccccagggaaatccaatctgcagacagagctgaaaaacactgatctaaatgaattagagaaacgtgtatgtaaataaaatgtattttatatatcagaaattctttgagagcaaatatccaaatgacttattaatgtatactatgtaagtatgggggagttttagaaactgatttttctttaaaagaatcttgtctttatttaacctatgaagatacagatgaggccgcgtgcagtgactcatgcctataatcccagcactttgggaggccgaggcaggcagatcacgaggtcaggagttcgagatcagcctggccaacatagtgaaaccccgtctctactaaaaatacaaaaagttagctgggcaggtggcaggtgcctgtaatcctagctactcaggaggctgaggcaggagaatcgcttgaacccaggaggcaggggttgcagccagccgagatcgcgccaggcacaccagcccgggcaacagtgtgagactctgtctcaaaaaaaaaaaaagcaaatgaacacataatacctgcaaagcaagaaggcatcttccttttaatgttttattttgcctttgttttgcctgttagttgtgcccactttgcggtacaaaaaaataagtgaaataaaagtaagtaaaaatgatcatttctgcttacgtttacagctcatttcatattctgcaaaatgttttcccgtctgctatcaccgccgccatcctcacagcagcctgggagaaaggcagagccaaaagtctcatctccacttcgtgcatgggtgatctgaggcccagttaagaaaagtggctctaccgaggtcccagagttggttgctggaggcactggcaaaggaatccaggctccagcccccttctctgcctcctgccatcttccagttgcttttttcctttctctctttctctatctctttccccttctctctgccttgaactctctctctttctacttcaactttcctctccttgctccaaccctcagattggagtcagctttgcaagttgtccaaactttttgtcactctggaaacctgccagccccatggccacagccccatctcatcaaaagctcagcatctgcacctagagcaagccctttccggatgtcagcgtgcaaagattaactctggtctctccatctggccctagataagataagattaggagagcggcactataaataggcccccatccttcctcaggcgcaggccccagccagctcaggctacactatcccaggatcagcatggccgtccgccagtgggtaatcgccctggccttggctgccctccttgttgtggacaggggtgagtgggcagaacctggattctctgtggctttgtgttggtaggtgagcttggggtgagagcagaagcagggcctggagcaccctgtgaggcctcagctttttccatgtaccttcattctgcatatgcaccctccactgtgctggggaaagttctgggctgggagaaaagaaacttgggttcaaatcctgactggcgcagaattaccaaagtcccctaccctcttggggcctcagtttctccagctgtaaaagagggcattgttccagttcaaagctgcactgagcaactattgggctggaggctgtggggacagaagggagcaggtaggtcccagctctcaggagagactgacaagtatgctgggtgcagggtggtggatgctaagagagacctggccgaggtcttctgagctcccgatctctctgaaaggctgtggtttgggacttgggcagccatgtgagcacgacagagccctttcccaggactggacacatatacttggggcagggccctctcaggatctgggccatccctgcaatctcacagctaccatgtcaggcactgttctgagcccttaagacagattagtgacccaaacagaaaaagcacggtcctgatggagcataaatccaatggggtagaggaaaaggggaaaggcaataaacaagatggttacaatgtatgttaaacggtatgttagaagctgataaaagttaaggaaaaaatacttggcagggtgatgggcactggaagggggttgcaatttcaaatcaggggaggtatctctgagagtccgatgtttgagcaaagcttgaaggagatgagggactaagccatgtggatatctgggagaagattccaggcagagggaacagctcaggtgcaaaggacctgaggcaggggcatgcctggagtgactgaggtactgtaagaccagtgtggcaggaggggacattgtacggagtgataggagaggagatgagagaggcaaattggaactgtaccgggaaagaccttgttggccaacataagaacttggcttttcctctgactaaaatgggaggcactgaaagctttgagcagagagttatgtctttcaagggttgctctggttggtacattgagaataaactgaacagggaagcggggagaccagttaggacccgcctggacaaaagccataagttataaggcaacgcctggcaggatccagggccactgacctcatggccagtcccacacccatttccccagctggaaacagacctgggcacagggggaaagggaaacgggtctggggacctgttcaggagcagcctgcttacgcccagcctggcacctacacctacctactccttgagcagttgggaacactgaaaagcctgctctgaagaagtttggtttttgtttgtttgtttttgtttttgttttttgcacatttcagactactgcctgggctgagtgaggagggggcattttgggtcaaggtcaagggcagcctgggggtaaatgtagcttttccccacatcccccagaaagaaactctgacatcttagagttctgaacaccccctcctcccaatacactttaatttttttttttatttaaacaaaaatttttttttcaagacagagtcttgctttgttgcccaggctggagtgcagtggcacgatcttggctcactgcaacctctgcctcctaggttgaagcaattatcctgcctcagcctcctgagtagctgggattacaggcacatgccaccacacccaactaatttttgtatttttagtagagacggagtttcaccatgttggccaggctggtctcgaacttccaaccccaagatttgcccgcctcggcttcccaaggtgctgggattacaccaatgcactttagtattcaattcctgaacacccacagtgtaggacattgaaccaagtgctgcgcaaaggcagacataaaggaaccccaaggagctcaggtgcatagggaggcggggtgacccagtgagtgggacagtacatggtggtgtgaaagaagcctccatccagatctgctcaggaaactgttggggacgtcaaggacagcttcactggggggcagcatcaagccttgaaaggagggtatgattcggcgggaggagaacggagacgaagacatttcagggaggggacatggcatgagccaaagcagggcccaatctaggacccgtgagcagagaggaatagctggggcatggagaggtgtactgggaagtcagcccaagaagcaagtttagggtcagcttacgcagtaccctaaacataagactaagcagctcaggtccatagggaggcttagtgatcaggacagggaaccacggaagggctttatattttttaaatgcttttcttttccctaacagttaaatatcaagaaatgcacaaatcttatcactcgatgaatcttgacaatgtatacactcgtgtaacccaaacccccatcaagatacaggacctcttgagacaaggacttagggaagaaaaataaatacagaacatttccatagccccagaaattcccctatgtcagtcaatccctgcccccatcccagtgctctgacactttttttttttttttaagagacaaagtctcactctgttgcccaggctggagtgcagtggtgcaatcatagctcactgcagcttcaacctcctggattcaaacgatcctcctatctcagcctcacaagtagctgggactacaggtgcgtgccaccacactcagctaatttaaaaatttttttaaatttatttttatttatttatttatttatttttgagacggagttttgctctgtcacccaggttggagtccagtggcacaatcttggctcactgcaatctctgcctactgggttcaagtgattctcctgccacagcctcctaaatagctgggattataggtgtgcaccaccacgcccagcaaattttgtatttttagtagatatggggtttcaccatgttggtcaggctggtctcgaactcctgacttcaggtgatccacctgcctcagcttcccaaagcgctgggattacaggtgtgtgctactgcaacctgccctcattgttaaattttttgtagagatgaggtcttgctatgttgcccaggctggtctcaaactcctggcttcaagtgatcctcctgccccagcttcccaatgtgatttttttccatcatagattagttggcctgttctaggatttcacataaatggaatcatagggtatataatcttttgtgtgtggtttcttatgctcagcaaactatttttgagattcagccacgttattgcatgtatcagttgcttgttttaattgttcagtagtgccccattgtatttatttatccattctcctgttgaaggacatttggatcactttcagtttgggcaatttgacatggaagggttttaagcagttcagtgacaggtctaggtttgcattttgataccccaatgccaggcttaaacagcacattggggtgacttagtctaagtttctgtttccctctctctgtggaaataccctgtaatagcatctccaggaaaatataaaactacattgccttgcacacctccagtgatgggaaactcactacttctggagaaagcctctttcactgtggcatagctcccactgagagaaaattctgcttcatatggaacccaaacctgcttccctgcagcctcctcacagagatgggctctgctttgtgaggttgaaaagagtccatctctccctcagccccaggatagcccttcagagacttcagggagcatcctgcccttctctaatttacataaacgcccttccttccacctgtgccattagacatagctccagttccctcatccacccatcatgcttgtcagtcacatcacagtttgctcatgtcctttaagcagttcagccagaccttgaggggtacaccagtgtatgtagaaagagtcaggctctggactgcaacagacgtgtgggaaaatcctacctctgccttaacaaactgcattgcgtcacctctttgagcctctttcgtagttcgttaaactgacctatgccccaggaaacagattctgagctatacatgcaatttactggggagcgttcatgggagtaacatccatgaaggatgagggaagttgacttccatgcagcacaacagaggcttcagatgatcctacaggcagctttgggcgaggggatcaggccctttgtaaccacatcaacccgacatgggatatgggctgttcctgggtagtggatgcagccctgggcaaggcagcttcattctctgagggtaattcctaggaagagacttgcagtgagtggtcaatatttctggcagcaggggaaatgagtgcctcagacttgcgcgagggctcttgatggcagaacacagcatccactactatctcctttcttccctctgttacacagcagtaagataggggtggagaggagttaaaatcatgtgttctcaatgcccggcacataataactgctgaattgctattttataattattatatgggacacaacaattccagtgggatctaactaacaaggaataggctggactgtcaccttcctaatttttgaatttctgtctctgtttatggaacccaagatcacatcagctttctggcagccccattgtctggtggctcatcacctttccttgaggaattccaggttgggtagttgctggaccaagctccctgaagcagaagcagtcctcagacccctagacctggggtctagagccggcataatctaattcttgcttctttgtgtttcagaagtgccagtggcagcaggaaagctccctttctcaagaatggtaaggcagctgcgtgttgttctcaccttctctctgctgagaggagtcctctcgtccatgctgagaaaccagttattcttctccacgatcctgctcagacaccttcaatggctccaaggtggccaaggtggcctcctggcctgcacattccccacattagcccccaaggctgagtaggcccagccccctcacccaagtcccaagattggcctcaaagcccttatgatgtcccccacctggtgtccaaggccccttccatcagtgagatctccccacccaggcttagcaggacagggtgtgctctctgctctgtatagtgcagacaggcaggccacagagttcaggccaaagaggggaccctggcacactgaaagcacctgtggagtgtgccagcctcccaccaccacattccatctgattgtctaaacaccaagttgtccccgaatcctgattccaccttggcccttggcctaatgcccccagtgacccagaaggcagtggtactggcatccttgagactcttgagattgccccttcatgtagtggaatgaggaggctcggagccaccttcccatccacagcctcagcatcgtccccgtcagtccatcagaatccagccccgcttattcagtgccaaagagccaaatagtttacatacattatttcaattagccctatgtgagagaaacgccactattataatttttacagatgaggaaactgagactcagagagtggaaatacctcaattaaggttatacagctaatcagtggcaaaattcaggtttctagggttcgggccttcacggttgcaccgcacaacctttctcagcctatccctgtctcaggcactaatgccagtcctgactgagttctcaccttgacctcaggcctgtcctaaaaccctttcagacagcctcaattaagccccaagctctgccccatttcttcagccttcgcacactttgcagcctttctgacatgggcctgatagatcatgcaggccagggagagttcaggagcccccagggagagaggggcctcctgggaatgatgggtggttccgtatcctggggtcttcaatgggaccagcagaagttctgattagtgcctctgaagagggtgtgaacaagtccccaggagcttgagggcacaaactcactccacacacatagacataaacacaggcatacgcttgaatgcctgcacaccgggggctccagagacacaggtacacatatgtacacatccagccataggcacacacgtggtcatgcacacgcacatacaagcaaacacaccaaggggctctgagtggttggtttcatcttcactggacccacactgggggccttcttgactctgatacctcactggggccccactggttccgagcagaacccctgtatccctccccactgcctctgaatccctgagtcctctccctcccttctcttccacagcccatctgtgaacacatggtagagtctccaacctgttcccagatgtccaacctggtctgcggcactgatgggctcacatatacgaatgaatgccagctctgcttggcccggatgtaagtctgccccacaacccctgcttgcttgggtgggccccatctctggtgcacagtctgaaaggagcaagacttgacctgcttcttccttcatacacgcttgacctgagaagagtcctccaacatatgcccctaatagaatgagtgccagattaactcaaagaaggcacatggttccaagcagaaatctagaagctggtggtggatagggagtaggggcagaaaccattttccttgttctgccttgattgactaggtgacctcatctgttttttcattcgtctagccagcaattatttattgagcatttactatgtgctaggcactggggctagaacagagcctaagttagacagcatcactggccttctggaacatacaattggtgtaagggggaagccaggctgatagtcagccaattgcagcacagaattttttttttttttttttgagacagactctcactgtcactcaggctggagtgcagtggcacgatcttggctcattgcaacctccgcctcctgggttcaagtattctcctgcctcagcctcccgaatagctgggattacaggcgcccaccaccacacctggctaatttttttttttttttgtattttaagtagacatggggtttcaccatgttggccaggctggtctcgaactcccgatctcaagtgatccacccgcctcagcctcccaaagtgctaggattacaggcatgagccaccgtgcccggccttcagcacagaattctaagggatcagtggggcacacaggaataagtagaaattagctaggaaaaaggagcaagggaagataattccaagtagatgaatttgaaaaggtctacaaggaaaagtttacatttgaggaaatataagaagttggacatgttggagtataaggtttaagggagaatcagggagaggcaagaagtgagtccagaaagatgagcagggctagaacatgacctccctacatcagatcacctattggctcttagtttcttcatcaataaaacccatcttctatgatcctgagaactaaatgagaccatggaagtgaagaaagtcctcggaagctgcaaagctctggatagatgtgaaagtttgtatttgaggaaatataaggaacatcaggatgttgtcctagcttagagaaagatcatgctaatcaaagactcatggttaggaggtacattgggagtggaattgacaggcttggtatgtgactgtatgtaaaggctgaggggaaggaggcagcatactggtttctgatttgtgggcttgggtggccagtggtttcatgggctgagatgggtggtttgggggtctgtaccagttctgtggggggcagtgatgtttgtggacagttgagcccctaggacatcccactggatatggacaactgcatgaacaggtaggacataggtccgagctggagacagatttggcagccatcagcgtgcgctggtggtggaaaccccaggaagctaaaatcccccaggggaagggtgtacaaaaaaggaaaagctgtagaaggatgtgcccatggacccttgggatctgccctgtatccatacactgcatatgtgggcgacgctcagcaggatgtctggatggactgtgccaggtccctgaatggtacactacagctcctgagaaggtagcctcatgcctgtcttctttgatcctagaaaaaccaaacaggacatccagatcatgaaagatggcaaatgctgatcccacaggagcacctcaagccatgaagtgtcagctggagaacagtggtgggcatggagaggatatgacatgaaataaaagatccagcccaactga

SEQ ID NO: 776 - DNA, 41623 bp, Homo sapiens
agattcacaaggccaacagacaacccaaagtcattaagccatgagagtggaatgaatctatgaaaactcaatgaagacagaacaagagaaaaatcttttcagccacgatgaattaggagaacaagatgtcaaattacactgatgctgagtcaagcttctcaaagcaagagataatcaggtatgggaattctacaaatttcaggatagcaggtaattaaatgttccaagatgtaagaggacaattgaaagtacaagtcttacagtcagattctggtacagaggctaggtttctattcatgttctggagatttatttgcatgtcaaaagcaatcagatctgaccctgggaattctcctactgtctttcactataacacacagcatttatttttttatttttatgggtaaataataggcacacatatttatggggtatgtgcatagtgggtgcatatatttatatgcctagtaataggattggtggatcctatgttagctctatttttagttgtttgaggaatctccaaactgttctctatagtggttgtactaatttacattcccaccaacagtgtacgagggttcccttttctccacatccctgccagcatttgttattgcctgtcttttaacggggaaaaaagccactttaactggggtgagatgatatctcattgtagttttgttttgcatttctccaatgatcaatgatattgagcaccttttcatatacctgtttgccatttgtatgtctttttttgagaaatgtctatccagatcttttgcccatttttaaagcaggttattagatttttttttcctatagagttgtttgagcttcttatatatgctgtttatcaatctcctatcaaatggatagtttgcaaatattttctcccactctatgggctgtctctttgcttggttgattgttttctttgcagtgcagaagtatttttgcttgctgtgatttcatttgtctatttttacttttgctgcctatgcttttgaggtcttacacaaaaaatctttgcccagaccaatatcctggagcattttcccaatgttctcatttggtagtttcataatttcaggtctagatttatgtctttaatccattttaattttatttttggggccctagtttcattcttctgcataaggatatccagtttttccagcaccatttattgaagagattgtcctttccccaatggaagttcttggcactttggttgaaaatgagttcactgtagacgtctggatttgtttctgggttctctattctgttcccttggtctatgtgtctgtttttatgccagtaccatgccattttggttactatagctctatagtataacttgaagtcaggtaatgtggttcctccaattttgttctctttgctcaggatagcttcggctcttctggtcttttgtggtttcatataaattttatgattgtttgttctatttatgtgaaaaatatcattggtattttgatagagattgcattgaatctatagattgctctgggtagtatgaacattttaacagtactgattcttttggtgcatgaacatggagtatctttccatttcctttatatcctcttcaatttcttacatcaatgttttattatttttattatagagatctttcacttctttgtctaaatttactcctatgcattttatttatagttattgtaaatggaattacttccctgatttctttctcagagtgttcactattagtatgtagaaatgctactgggtcaggcacagtggctcatgcctgtaaacccaacactttgggagactgaggcaggcggatgacttgagctcaggagttcaagaccggcctggacaacttgaaagatctgtcctgacaaaaccctgtctctacaaaacacacacacgcgcgcgcgcacacacacacacacacacacacacaacataaacttagccaggcgtgatggtgcacatttgttgccccagctacttgggaggctgaggtgacaggatcacttgagcctgggaggcggaggtggaggttgcagtgagccaagatcatgccagtgaactccagcctgggcaacagagtgagaaactgtctcaaaaaaaaacagagagagagaaatgctactgattttcgcatgttgattttagtatcctgcaaatttactgaatttgttcatcagttccaatagttttttggtggagtctttaggttttttcaaatataatagctgcaaacaaagataacttgactttttcctgtcctttttggattccctttcttcctcccatctgattgctctagctaggacttccagtactatgttgaataacagtgcaaacatgacagtgggcatccttgttatgttccagatctcagaggaaaggctttcaggttttcccctttcagtatgatactagctgtgggtctgctgaatatgacttttattgtgttgaggtatgtaccttctatgcccagtttttttagggtttttatcattaaggaatgttggatcttataaaatactttttcaacatcagtcgaaatgattatatgatttttgtccttcatgctgttgatatgatgtatcacattgatttgtgtatgttgaaccattctcacatccctggaataaagcccactggatcatgatgaatgatctttttaatgtgttgttgaattcagtattcttatattttgttgaggatttttgcatcaatattgatcagagatattggcctgtccttttctttttttgacgtgtcttttttttggttttggtatcagggtaatattagcctcagaaaaatgagtttggaagtatttcttccctgtttttcagaacagctcgattaagattggtgttagtttctctttaaatgtttgataaaattcagcagtgaagccattgggtgccgggcttttccttactgggaaactttacattatggctttgctctcattacatgtcattggtctgtttgggttttaatttctttttttttttttgagacggagtctcactctgtcgcccaggctggagtgcagtggtgcaatctcggctcactgcaagctccgcctcccgggttcacgccattctcctgcctcagcctcccgagtagctgggactacaggggcctgccaccacgcccggctaatttttttttttttttttttttgtatttttagtagagacggggtttcactgttagccaggatggtctcaatctcctgacctcaggatccgcccgcctcagcctccaaaagtgctgggattacaggcttgagccaccacgcccagccgggttttaatttcttaatggttcaatcttggtagtttatatgtgtctaggaatttaaccatttcttctaggttttccaattaatgggcatgtagttgctcatagtagcctctaatgatcctttgaaattctgtggtatcaattgtaaagtctccattttcatctctgatttatttgggcgttccctgtttttcttagttgggctaagggtttgtcaattttatcttttcaaaaacctactttttgtttcattaatcttttgtattttattcatttcaatttcatttatttctgctctgatctttattatttcttcttctaattttgagtttggtttgctcttgcttttctagttctttaagtgcattgttaggttgcttttttgaagtttttctacttatttgaaatagacacttattgctataaactttcctcttagtactgctttcactgtatcccataggttctgatatgttatgtttccatttacatttgtgtcaagaaattttttaatttccgtcttaatatcttcattgacccactgatcattcaagagcatattatttaatttccatgtgtttgtatagtttccaaaattcctcctgttgttgatttacagttttattccattgtggtcagagaagatgcttgatatgatatcaataatttgaattttttaagccttgttttgttgtagcctaacatacagtctatctttgataataatccatgtgctgagaagaaaatgtgtattctgtagccattggacgaaatgttctagaaatatcaattagatacattgttctatagtaaagattaactctgatgtttctttctcgcttttgtctggatgatctttccagtgctaaaagtggggtgttgaagtctgcagctattattatattgaggttgatctctctctttagctctaataatatttgctttatatatctgggtgctccagtgttgggtgcgtatatatttactattgttatatcctcttgctaaatttactcctttatcactacataatgaccttctttgtcctttttacagtttttgtctcaaaatctattttgtctaatataagtatagctactcctgctctttttggtttccatttgcatagatatctttttccatccctttatttttggtctatatgtgtctttataggtgacatgtgttctttgtaggcaacagattgttgggtcttttttttctttatccattcagccactctatgtcttttgattggagagtttagtccatttacaatgttattattggtaagtaaggactaactcctgttgttttgtttgttttctggttgttttgttgtcttcttttcctttttcccttttcttgcatcttgctgttagtaaaggtgattttctctggtggtattttttaattccttgttttttatttgttttgcatctgttgtagtttttttgatttgaggctaccataaggcatgcaaataatatcttataaatcattatttttaaactgatgacaacttaacactaattgcctttaaaaaaaaactaacaagcaaaaagaaaaccaataaaaactctactatttaacttcatcccttttctttttaactttttgttctttctatttatatcttattatactatgtcttgaagagttgttgtagttattatttttgtaggtttatcttgtggtctttctactcaacatatgaatagtttacactcatatgttgttttttgacacaaatattctgttttcctgtggacttactagcaccagtgagttttgtaacttcagatgatttcttattgctcattaacattcttttctttcagactgaagaactccctttagcatttcttgtaagacagatctagtgttgatgaaatccctcagcttttgtttgtctgaggaagcatctctcctttatatttgaaagacattttccgtggatacactatcctaggataattttttttttccttcagcactctaaatatgtcataccattctctcctggcctataaagtttgcaccgagaagtctgctgccagacttattgaagctcctttgtatgttatttgtttccttggtcttgttggttttaggatcctttgttatccttggcttttagatgttttattattaaatgtcctgaggtagtcttatttggcttacatctgcatactgttctataaccttcttgtacttggatattgatagctttctctaggttgagaaagttattcttatccctttgaataaactttctactctgatctctctctgcctcctccttaaggccaataactcttagatttgcccttttgagccattttctagatcttgtaggcatgcttcattgtttttcctttttttcttgtctcctctgattgtgtattttcaaatagcctgtttttgagctcactaattatttctgctgtttgataaattctgctattaagagactgatgcattattcagtatgtcaactgcatttttcagctccagaatttctgtttggttctttttaactatttcaatctctttgttaaacgtgtctgatgggattctgacttccttctccatgttatcttggattttgttgagcttcctcaaaacagctattttgaattctctatctaaaaggtcatataattctgtatttctgggatatgtgactggtgccttatttgtttgataaggtcgtgttttcccggatggtcttattgcaggtggatgtttgtctatgtctgagcattgaagagttaggtgtttattgtagtcttcacagtctgggcttatttgtatccatccttcttaggaaggctttctaggtattcaaagggacttgggtgttgtgatctagtctttcttcactgcagccatatctactttagggcaaaccccaagcccagtatcactgttgctcttgcagactcatagaagtaccaccttgattgtcttgagtaagatccagaagaattccttggattaccaggcagactcttgctctcattccttaacttcccacaagcaaacagagtctctctctgtgatgagctacctggagctggaggagtattgaaagagcacccctgtgtccaacaccactacaacttttctgggtcaggcctgaaccagtacagcactgggcccagagcgaacactgcctggctaccacctatgttcacccaaggcccaagggatctattatcagtaggttgcaaatccagccaggcttgtgtccttcttttcagggcagaaagtttaccttagccctgggcaggtccagagatgccatccaggagccagggcctgcagtagagaaccttagggatctatccgatgctctattctactgcaactaagctgccatccaagtctcaaggaaaagttcttctcactcttccctcccctttcctcaagtggaagaatctcttcgtatggttcttagtgccccatgcccactgtgagtactgcctggctactgccaatattcactcaaggcccaagggctcttcagtcagcttagagtgaatgctgccagtcctgaatctgtcccttcagggctgtgggctcctctctcacccagggcaggtccagaaattctgtctaggtgctaaggcctgaaactggagactccaggaaccctcttgttgctctaccccactgtggctgggctgatagtcacactgcaagacaaagttccctgtactcttccctcttcttttctcaagcagaaggagttcatccccatagccaccatagctgagaatatgctgggtcacacctgaggctagcatggctctgagtcttacccaaggacacagcaagtatttcccagctatcactgctgaatattcagggcccaagggctctttagtcagcagatgatgaatcctcccaggactgggtcattcctttcaaagcagtgcattaccttctggcccatggtatatttagaaatgtcatcttggagctagagcctggaatgggggcctcaggaccatggtgccctatctactgtggctgaacaggtatccaagttgcaagacaaagtcctctttactctcccctctcctcttctaaaacagagggaaggagtctctcctggagctatgagctgcactgctggggttgggggagaggtggtgcaagcactcccttggccaccctagctggtatctcactaggtcacgtgtacccaagtccactccgccacaggaattgtagtccttatggcctagactgcctttcaagtttattcaagaccccagagcattgtagtccactctggcaggacttgctagaacccaggttctaactgctgtgatggatgatttgcctctggcttaggctgacctaaatgctccttctgtgcgtgccaagtgagttctgtcctgtgttgcttttcactgtgacagggtagcactgagttccaagcagagtcccataatcactgcattctccctccccctacaagcacacagattctctgtgccacatggctgctgtcagggaatggggaaggatgatgtcaatgattcagggctgtctcctacccctttcagtgcttccttccttgatatgatgtgaaaaccaagcactgtgatcactaatcttatttttagttgttatgaaggtgcttttttgtatggatggttgttcagtttggcattcctgcggggaagacaatcactggaggcttctatttggccatcttgctcccaaagttccaggcagccttttcttgaagggtgagatgatttgggatcttgtctagttttgcactaaagcactaagtatttggtagagcccttaactcatcttggtctatttccttatttgtaaaataagggatcttcattaactgatctgtaaaaccattctcaaatgtaaaatcctataattctattgaaaaaattttagatacaaacctctacacttacttgcttgaaaaacattgtaattataattcttgtcgacttgtgggctattactcaatgtccagtaatttttgtgaaagttaacacaactccataataaccaatctttataatttttttcttactgtattttttagttatttcaattctctggaacacaaattcatactaatcttttctcatagaatatttatttttgtatttttctatgaccataaacttctctttccaacgcagccagacgttacataagatgttttccaatgaccgtcaattggaatcaccaaagaggatgttgctagatcaacatgaaccagcaaccattatgaaaaatacaactctaaacacaagtccccccaaccaagcaagatcacaagagataaggtggtttgatacatctgtgaagcagtgtcttgtcatcaaccaccatatctctgagtgtctgagtagctggtgatgctacccttttcagcctcattttttcttacattaactggaataatatctgccctactttctcaagtagtggttttaagagtcaaatgatataatgtacataaaagaaattgtgcacacgggagcattattgacattaaagagtggaagtactgtatttttctctgaatagactgtacattatcaactaagttaactgtacatgtcaactaagctgtggtctaagtctgtaaaatatctattttaatgagactttttttacattaattcaagatttcttgaagtttgttccatgaatgtcaatagatgttttacaaataattacaacaatgaaactccttaaaaaatgttttactaaataggctgaataaatgcttggttaggcaaagttaaatggcttctttcctgcaaaacttcataaaacctttcatatgccaatgtgcaatcctccatgggatcctcactgtgtaatacagtgatttccagcttatttgaccagagaaccatttttctagagaacatctcttagaaatactgcccagcaagtatcacttagggaacagcactagtaaattgttttctctggtataacttgctgaatgaagcagaacctattcagcatgtaccccagagctggaatttcagacacacacctagaaggaaggtaaagtagctaatactaatttcagctgggttaatcacttttctaataacattcaaataaatagggtttctgagcagcagatattttagaggaaatgcatctgttgattcccaggttttaaagtaaaaccatagtaagtgaatgtaatttggtgagcagcagatatcttagagaaaatgcgtctgttgattcccaggttttgaaataaaaccatacgtaagtcaatgtcatctggtccaaattcacctacccacatcattagagctgtcctcccttctcatttcctgactatattgtaataatcccctgtttttactattttttttctttctcctcaaaacttaaggccctgagctttctggtacattattgagggaactgataaaggacagaatagtctagtaaataagaacttattctggagctggactgcctggatcaaagctctgtgtgtggcctttggcaagttacttcacttccattggcctcagtttcctcttatataaagcaaatataataatataagtatcctcactgtctaaatttaggaacaaaatggattggaataaatatcttgctatttaaactcctactacttgctatcttaaaatgaggaactaaattgatttggatagtatgatattgtcattttccaattttgctactcaaactcaatgataaaatagatttgatagcaatattcgctgtgcttacatcaaagaattgttatgagcactaaattaagcacttatgagagtatctggcaatagtgtttgctatttctattactctagctaatataatattccataaaaataataatactagacttctaggcattttattcttatttaacacaggttcttgctactgtaatttatagttttattaaaggactgatcctcaagttttatttacgtattcatttgttttgttttgtttcttgttttaggaaagaaaaaaacatggggctatgaactaggagatctcatttctagccctgtttctgcaaagtactaattgtaacacgttaggcaggaaaataatctcttgaaatttcagtttactcttcagaaaaatggaactaatacctacccttcatgcttggttaagcaaagttaagtagagactagttaaatagagactaccctactagggtagagacttcattttttccaccctaatagggttggcagagaaaatgaatataaaagtatgctgcaaacagtaacacgtaacactcaggaaagagactgactgtccacttagatcacttcttattttatttgggggatgggatataacctcaaaattacaatcctcattctaaaacccatatgaaacccagaatcatgaacaaatctattgttgcagaggaaagcagaatgtatttcacactgattaacagactggcgattagacaatgggacattttaaaaataatattcactgaagcaacaaacatttattgaacacctactaggcaccaggaattgttcttggtgcaagcctgctggaatcatggaacatgtgacttattacctacagaaccagatgttaatgtaaatttcccctgtcatctgccatcttgctgatccttatcaagtcacatattctttgatcaagcttcttttctttgtaaaaatggccccctgcttcatgagactaagactatttgtaagatcatgtactaaagtgtttgcatttcctcaacaggaaagtataactgaaaaccagtcttccttatcagtaatataccaggggactgatttccaatagcaatgcctgctttgttgttcattcatgttcctccctcggaaatttaataaactttatctaaaaggtcatgagtccttcctggatagcagcaccaaaggtatttgtatagcatttaatatttagccagccctttacaatatcattgtttattttcctcctagcaacccaacgtagttcattactatcatacacttttttaaaatggagaggctgaggccctaacgcatatacaatttatcaaacttagcgaccaatgttattctcactcttttagtcaagtgagaagtcatctagttgaataacacttttagctttaaaaaaaaaaattttattccctaagtataactaaccatgcaaagaaaatttaattctagcaggaaaaaaaggctcaaatagaatatcaccccatgccacgcattaaaaaaaaaaattactgtattgtttaatataacaggaactctcctttctctaatgtcattttccccttatcccaaatatctgctaaatgacccataaaatatgctgtgaacttatctcacactaatatgaaactgcaaaaaaaaaaaagaaaacaaaaggaaaagtccctaagtgaatggtaactccacaatctctactgtataatttctctaattgaaaagcaattgatttttctgaagaaaggtcataaaccctggctgtctgaagtcaggctctctgatctcagctactgtttcaagtcttttccttctgcaatacccaactttacttaagtagacaaaaccacctcccaactacatgggtgatgaaaaacaaccatactgaaccccatcagcttccctcctgctgtcctccaaatttttacctgctgctaaagaaaagatactctactttcagaatgtcaaggaaaacctttcctcctaagtttttccactgcttcaccatggatcgttgtgtctcttcaattcttgcagtccttggaaatcctttccttgttatctctaacaagctcagatggcctctactctaaaataaacctttatccaccctgctactccctcaaagtatcaccctctcttgccacccatttcttgagttattggtattagttttccacaaattactctccacccaatcacatcttaaagccctaaaaactggcttttgctcccagtcacctactttcacatcaaataaaagggcacacatattccgttagcaaatacttttggaacacatactatgcttagcgctggaagtgcaacagtgacatagagcgtacaacatagtggaggaaacaatgaagacacaggtgaacacatttaaaaaatacttgccgatattgaagtatctgtgaagtatctatgaaggaaagaaatggggaaaatgatagatgatggcaagggaagcctactttcttggatacaatggctacagaagcttttctgaaatggtggcaaaaatagccagtggtagcctaggcaacacggcgagaccccatctctactaaaaatacaaaaatatagccaggcttggtggcacgtgcctatagtcccagctactcaggaggctgaggtaggaggatcacttgagcccagggtgtggaggttgcagtgagccaaggtcacaccactgcactccatgccactgcacttgagactgggtgacagaacaagaccccgtaccaaaacaaaacaaagccaaaattgccagttgttctaagaagaaagtagaatgaccctttagaacagagcaatgagatctacaaagagttgaggcaggaaagcacttggtgcctttgatccagtttctaatatccagaatctatagggaacttaagcaaattggcaagcaaaaaaataataatctcattaaaaaataggcaaaggaagtgaacagacacttctcaaaagtagacacataactggccaacaaacatgaaaaaatgctcagcatcactaatcatcagagaaacgcaaatcaaaaccacaatgagatacatctcacaccaatcagaatggctcttactaaaaagtcaaaaaacaacatatgctggtgatgctgcaaagaaatggaaacacttacatactgctagtggaaatgtaaattagtccaaccactgtggaaagcagtctggagatttctcaaaaagcttaaaacagagctaccattccacacaacaatctcattactgagtatatatccaaaggaaaataaatccttctacctaaaaggaacattcacttgtatgttcattgctgcactgttcataatagcaaagccatggaattgacccaagtgcccatcaatggtagaatggataaagaaaatgtagttcatatacaccatggaatactacacagccataaaaaagaataaaatcatgtcctttgcagcaatatggatgcagttggaggccatcatcctaagctaattaactcaggaacagaaaactaaatgccacacattctcacttaaatatcctttaaacattgagcacgcacagacataaagatgggaataataaacactgtgaactacaagagtggggagggagggaagagggcatgggttgaaaacctacctattggtactgtgcatactacctgagtgccaggatccatatccccaacctcagcatcacacaatattcccatataacaaacctgaacacgtgcccccgtttataaaagtcgacattttttacaaatcagcatctaaatgttttaattatgatagtcacaaaaaggagtgaagtactgagttatgctacaacacgatgacgctctgctaagtaaaagaaccttaaagatattgtgctaagtctacatgtgactatttatatgaagtgtccagtacaggaaaatctagagacaaagtaggctactggttgcttaagtctggaggaggagggtagggaaataggaaagaacagctaaaagaaacaaggtttcttttggaggtgataaaaatattctaaaatagactgtgatgttgcttgcatgtacatgtgagtataataaaaacaccttattattcacttggaatgggtaaattgtatgtgaattacatctcaacacatttttatctaaaaattttaaaactttaaaaattaaaaaaggtatgttaaaaactttaggcaaatttaatagagtttgagcaaagaacaatttagaaactgggtaacactcagaagcaaaagaggttcagagagctctgctcaccaatgggagcagcaagcttctataggctgaacgtgaaaggaaagttgagaaatcacctgattggctacagctaggtatctgccttattggggtacagtgtgatgagacacttaccttatttgggcatggtatgatgagttggccacctgtgactggctaaaacctagctatttgttacaaaacacatactcctaaattaggtttcggtttgtttatatactaagttaggttgcagtttattatgtagaaactcgaagtatgaagacagcctcaggctaatttcttcctgcttatgtaatttttttttttttttttttttttttttgaaacgtagtctcgcgctgtcgcccaggctggagtgcagtggcacgatctcggctcactgcaagctccgcctcgcgggttcacgccattctcctgcctcagcctcctgagtagctgggactacaggtgcccgccaccacacccggctaattttttgtatttttagtagagacggggtttcaccgtgttagccaggatggtctcgatctcctgacctcgtgatccgcccgcctcggcctcccaaggtgcgggattacaggcgtcaaccaccgcgcccagcccctgcttacttaagaagtacttcccactactgaccaaatcaagtgtaaaacccctagtgcggcaatccacgtctttccatgcttcagctgcagctgccttgtttgaaatcttggttcctacttctcccctaaacatactctatgcagcaaccaaatggatgggatgcatttttctatctctctttattcactgaatgcatgtttgttgaattcctcttgtgcgaggcatcatgcaaggtactggccctttcgggatgggcaaagctagcaatgaagagtttggtctgtaacaggggctttcaaatgttttgcttctataaaaatttgttcaaaagaagttttcactcagaagtccactgtgtaaaacaaaaagtgagagttgttctaaatgagatttgggaccgcctagtttttctcttcctccacaggatccttcagagaatctgtaaaagtaccttagaaacccttgatgttcatatactatgctttgaaacacacacacacacacacacacacacacacactctctctctctgtcttacttctcatagatcatatatttccccaattttttgccaactacttttcatattttgtcctccctcaatcatatgttcctttagaaaaactctgagtcaagttctatttggtagcagctatgccactacaaaagacttattttttttacaaactcaagcatgaattgggtgtgctgtgagtcagcttattcataagcaagtagcttagtaaattctcagattacagatgtgaagtgtgagtagacacacctacaatagcttctgaacaaatcaaacatttttagcttccttgtatgtcatgaattacagattctaagaccttcgaaagaccctttaaaaattctgtacagatgcaggtgagaaaaaatttctaagttttaatttacaaataactggaaagcacagaagttacttgtaatttatatatacacatattcatggttttaattatttttctatttactaaaacacttgctataaagaaaaatatattgaaagactgctaagtaacattcattaaaatttaattttaaaagctcacctatccagaaactcctgtaacactgaacaattataaaatttaagaactttgttcccccagggtttataggatctctccatgtatttctctcttgaaagtctccagattgctcctaatggaagaaaaagttgtgttatttgtttatgcaagcatcaattattaataaaaataaagcaactagcaagaattggtggccagaaaagaggaagaagaagtgggtttgctgcttgggatactatataacatttgcagaggccttatggtgttccaagcactattcttagtacatgacagatgttaacttgcttgttcttctaaaacaccctgtgcagtagctactattttcttcctcatttgcccatgagaaaactgagctgcagagagatcaagaaacttcctaagttccctcagacagtaggcaggatcaaaccccaggcacagccctaccggcccaggctcttcctgctgcctcgcaccacccaacagtgctgcaggctgtccaggctaaaatagggtgctgaggatcacagcaaaacacaagaccagcttttgcagttgctggcatccttatgttttaaaaattgcaagttctccctcccgaaaaatatcttctacactggttgttaaccgtttctgaagtgctatcattagcagaagtttatggttggttgtgaaagtctctttcctccccatccctgtcttacgcatcaagttccctgggagcaggtatcatgtctcaccctctttgtatctccctgaggtacctagtacaatgccacacacacagttaagtacaaaagtaactttctgtgtgcaaggaatcaagttaaactatctttgagtcttaaagggtgttcatcttcaagcatcttaaagaggcaaagtgagtgacgaccttaaatcaatgtcagccaggtcctggctgtacagggacaagtttatcaggtgactttggaagcatcacagctgagcacaggatgctgagggaatggtgctgggagtcaggacaagctgatcctgctgaagtaggtaaaacgggcctcagagaaacgcttcatggactctgcctttcctgaggctgaccctgggaacaaaatgtgccctctctgacacccacccgtaatcccgcatcaccctttaatccaaagaatcagtttacacagacactagagtttctgcccagtgttctcagttccacagagattgcacttcaggctgtctgccgcgcaatgaaatcagcatctctctggctgcatcttctactccgcctgccccagctcatgtgattccagccaaatggcctcctccacccgcagggcaggcttcttgctttttcctctgcctggctgtctcccttcccttagcactccatttaaaattgcagacacctgtaccaacgctccgtgtcctccttatttgctttatttttctccatccttgttacttctatgtaacacactatgcgtttcactaacttattttgtttattgtctgcctctctgtgcaagaatgtaaattccaggagcccaagaatgttgctgttttatttgttgctgaatcttctgtgcctaaaaaagggcctggaagtagtgggcatgtcacaattaccttttggttgaatgaagtttccttcactgttactaatcagtcatcaccaccaaaaatactacctggttatatgcacacagacacatacatataagtacgtatacatatatgacacatatatacacacacacacatacacatgcacacaaatatgcagatacagacacacacacccctggatagtatattagatatattaaaaacatgcttggtattaaacactgagttttcttagaataaagatggcacatcctgggaaatctgccgacttaccccctatcccatgagattactttcttagatgtttacactacagcacacatatcctgaatgttatcatttctcattccaaggacaaatacataagagcaggaaatagaggccttcttccacttctacaagaagaatgaggtgctattgccatttcacccaccctaaaccaggcctctctctgggcacccatctgctgctcaccacctttatagtcaccacctgacttggcctgggcttgcccctggctgcccacctcacctacttcccttcttcaatctccctctcaccaatcaatatgagtaaagcctggtgctggctccaccaaaactttaaataaagccactcccgtgttaccatagcaataatcgctcctcagacaacactctttaagctgtccccctggatcttcttgtccagggagcagatactcatttaaaaaaaataatcatgagagttcacattaacacaaatcaattcagacctggatattccaggagacagggtttcttttatccctactcccctccaactgacagttccagggaacattcggaaatgtcaagtgggttcagaaaaagtgatttgggttcaaggaagggagctaaagctgtgagctctgctgaaactagggaccctggggaaagagggctagaaaataccacctaatgactaagaaacccaaaagagaaacttgtctttttcagagacctggtagagaaaaccaaaataaaacatgctcttgcgataaagcaaaattctaagtctgtcctatgtgtgggtttggaaattaagtttatgccatcctcattgtgctgaaatcttttaaggaaagtaattaacataaaaatgactgtggaccagagatactattcaggcacctgccagatgcaaactcaaaaaggctccatagaaacctgtctacaacgcagcacaccagattccaacagaaaaataatccgcaaggaagaggagttcacaaataaaaaaaaaaatggaccattccaagaaaagcatcccctcaagggagagtcaacaagcaaaacaaataggtttgtttagtacttccaatttaaatgtttatacttattaaagaaatgtttaaaagaaacaataaaggtagaaggctataaaaataaacaggtagactgagaaataacccaacaaaatgtctataaatgaaaaataaaaccaccaaaacatgtagagagtgtaccacgtcaacaccttggagtggtgaaagtggaatatcatccagatactgtctgagaggacttgaagtgattccatttgcattttataaagcggaaaccttccccagatgtcaaagatgggacaacactctgccccaattctagcaatgagatggcacaatacttctctctagagccccagtggcattatgctaacaaactcagttctggtttacacattttttttttttttgagatggagtctccctctgtcgcccaggctggagtgcagtggcatgatcttggcttactgcaacctccgcctcccaggttcaagtgattcttctgcctcagcctcccgagtagctggaactacaggcacccaccaccactcctggctaatttttgtatttttagtagagacagggtttcaccatattggccaggctggtctcgaattcctgaccctgtgatccgccctcctcggcctcccaacgattttttttttttttcggtcataacatagcactttgcctaccgaatacacaggcatccttgaaaaagaagctttgaggatagccagtctagctgctgggacagatgccaagggtgtatagaggaccaaggggtcttccaggtcttgtgaggtggaggaagcactatcttatttattctccttttgaaataagcactgagtccagatatgactctagaactacttctttctccgactttaggtaagacagactacacaatgcatttctgtggtcatatctttgatgctgacctgtggttggaaataaaatataaaactctttgtgtgtacccagcaccctagaattctggcaattagctattagcataaactggccccctgggcactatttttgcattggtcacttccttcttctgagcttaatacgtttgtgttgggttattgcctaacctgaaatgttcctccagagtgcttaccaaagtgaaaatggccacaaaatccgaacctcagaataaatatgtgcaaaactgccatgtaaaagctgtcattaaaaagaaattgtgtgctagtctcaatctttagttccactgaaacctgcggtgttttcaggtgacaagatgccacaggatgtactattgtttctggtataatgtgctttggagactagtttttatttaatttctcttggatcacatatgccagaataaatattatattactttatacatggtctctggtttactctggctcagaacatgtagttagtcaataaaggaaggcagttttgccaaaattcagtcgtgtatacttttcaaaatagttataaaagtaacactcataacccataaaaatataaatttcatttttactcatgagtcatcttatagaaaaatatcttccaaattcatatcttaataatttcaaagcaatcattttaggtcctttaatcaacttttccacagtctagtaatactaaattatgtaaatgaccctaataggcaaaattatgcagaaaaaccttatgataaaaagttgacaaatagtgctgaaagtgcagtaactatggcaaccaactcactacaaataatttgaaaaatgcagaatataaatgaccgattacattttgagagtatcatggttaataaacaagtaccataataaaacttcagaaatcatagctatagatattaataacaatttaaaacatatacgaaggtgtgctttcagaaatttttaacacaattttcacagcttttctgctttatttccttcctctgtgttcaggaagtccttaatctcagttttctaaactaatctgagctgaaaatgatacactttggacatgtcacataaaagtaatttgaaagcaccctgagaaaaaatattttcatttaagagcagtataaaatcagcctgagccaggccagtaaaaatgaatctaatgagatcagtctttaagtcacaaacaaaatgtccatatattcgtttgaaatttttttaagttactttcctatctatagtttggtgcttaaaaaacaaaaattgtcttagtgctaattctggttttttaaacaaagtgatcttaatcatgtcatatggaaatctccttataaaatatctacacttcatgccttggatacattcagatatccctcaaaccacattggcagcctcagaaaattcaccaaattcatcaaataatttaccatttatactaattagttggttgaattgcttggactaagtgatcctttcattcggcaagccaacataaactgggaataatagaaaactagtttaactgtaactaagagacacgtataaagttacatcataagtattcactgaattgaaacccattttcccccattatacagagtctaaaagcccataaataatgaacaagtgtgatctttccctaaaatcacaggttagaaaaaaaaatggaatgcagtgaatatagcaaagcttagtcttgaaatgatgacgaggacttaaagaaatcaggaagaaagtaaatgtgacaagtttcttctctgtttgctttctaggctgacctattgctgaggactatgagaaaaaagttattacagaatgagtcatatggaaaacacttgcaaacagaagaatattgagaacatagtacgtgttattctctcattggtacttaacattaaggataaaacataaaaagcagggtaaagcatcccaaaataatctgtgaaagcaataagtgattctgcttctttaagtaacaatatggcaggttttttttgaaaacccaaggttacccaaactctgacctttgaaaccaattcctccatttggagaaacaatacaataaaaccaactggtataaaagacaagcacaagcccattcactagaggcaagtttggaatcatagatcacagaaaaagtagtttggccttcctagaaatatattcaattacatgcacacaaaaggtgaggtcttggaaagttacttattactatttgaaagatgagaaaaatataatcataatagtattttcttttgagcctatttaataataaagtgtgtattctgttgtgaatttaaaatattataatttggggggttttgcctgttagaaaaaacttcataaactgaagtattatattacatgttgtagtataccacgtgctatatttaccaagttaatattgatatgtaatacacttattatttccataatatgttggttttttatttactaatgttccttatgaaacacctgccttttcagtatacagatgactagataatgagatagaaaattctagatctagtcatgaccacaagataactgtttacatttgataataactatgtaatagttttcaaaggaataaggtttaaaaaaaaagaatcagaagaaatttcatggaacttagtcaaggtaaagctgtcttacaaggtggaattaggccttttttttaagtcacttccatgcttaaggaagaatgacatcttctgacagcatctctgtttattcagtgctccacccgaaggagtgtatttatcatctaacaatattgactctagggtcagactcgaactgctaaggacacgtcgtcttaatctgtacaaaatctgcctttcatatatggtgaaagtagttactgaacccaatttgttttttaatgcactgtttgtagcctattcaacctcattagcagcatatcatttcgatggaaaattcttattgactgagattactcactgcaaattctaaaagaaagatcttaatgtctgctttataaatacccatcttctaaaagataagagttcgtggggaaatcacttaataactctaggtgttattacattttaaattactttttattcctcctcctctacaaagcacacctccaccatgatgtaaaagaattttaggctgtgggactttattcagagcaaacaagggatttgaatggctgtgagactaggattccttccagcttagtacagggtataaaatttctgctcaccaggaagaaagattagattatgctgtaaaacaagtgtggagagttacatgccaaatctcaagctgtgggctccttgagaatggctaagcatagaaacttgaacacaagagcaaacgtttgagggtttataaatccctcaaagagatcctaggattgggttcagtatataagtgaaccctctgaagtaactgtaaaattttgcatatgcctatatatgtgtatcttacctgcagataaattcaatagatttcatcatccagatcatgtaacttattgtccaaatcatggtacttttgagaatgaaagaagacattctcaattattatacccagcaacaggcttaaactgaggctctcctgggcaaactgagaagtataatcacctcattcatgaccccaaaaggtaatacactactgcaccagaacacttagcttttcattatttcaacccaagaacccttcatgaattttcgtttaaagccactgatttttatacaatcagtgtattctcctagtgtctagttacaagtctcgccgcatttggcaccagttgttgccttgagatttgtagctcctactggacttggatccagggctatgacactatcctgcctgtcctcacactttatactttctgtgctctgcaagtatttcttttcctcactcctaaatggacaatcattaccaaagttgtatgctggtccttttgctctatactttcccgcaagaaacacatctaattgtatgacattaagtttaacatatcaatgactggttctcagcctttgacacatatcatggtcccaaactttagacccaggaaccttcatccacccaagcagtaaatctgctcctccatcactagtctcaggaaagaatacaaagaagagtaaagctgataagcttactcaaagaaaggttttgctaattatgtttgcaaatctgctctgttgggcatttagaaagtttaagagaattagatatataagtacagtttaaactatttttaacaatttcattactggatatcaattaaaactccagaaactctaaaccattctgtgcacaaaagcccaattcagaaattaaaataaattcaaatggtaaccaagttttcctctgtcaaaacacaaatttttatgtgtccatttctctaagctagagttagggagaatttattcagctatttggtcagcagttagatatgtttttgacaagtcttctctgaggcaaaccctttgagtacaagaagtcatttgcacttccctctgcataaggctcataataattcagtaatgtggaattctatgcatctacaggcttatctcattatttcctgacatcagaaggcagcctgatggactgaaagaaatactggattaattatcaccaactatggaaaattttagatcttctctctgttcatcaattttgtggctttgcgctaattatgtccactcacctgagcctttttacttttttaaaagaaaataatgaagtctggtgagattgttataatgacaaatgaatatttccaatgaatatatgtgaaaagtttaagacttgtgataggctataatcaaagggtaatccaacaaagattctgctgtcatagactgagacctaaatgatcataatacagagaagtaatacattctgtattactaactaatatttttgagtgcttactatgtgttatgtaccattctaagcactttatgtctattatcttatgtaatcttccacagatcctatatagtaaaaaagtagggataggaagacctacaagtgagacaactaaagcacagagaagttaagtaagttgcctggattagtagagtatgtaacagtcaggaaacttgattcaaactcgaacctatctgaatctacagcttgccctcttaaccctcacatgcttcctcttgagggtaaagtctaaacttagaatggcattaaaggcccaggcaaatagccccaaaacacccctccaaccctattgtctatgagctacccagatgtctctcacttcagctaggctcgtccttaaatatcccacaaatatattttgcaaattctatatcaccgtctctatttggaaatcttgctttctgccgtcaagttgagcactctagtaggtagcaatctctactctctctgaaaaataatcacacctgacgtctatcccacttacttgtttcttgttgcgtgccattctcatgtgaatggctaatttttagtgttgttccatcttaattcttcaatcagatcgtaagtaaccttagagtagaaacagtgttgtaaactgctacatgttttccccatagcatggcccatcactccgaattgcaattatctatgtgtgtgtctggctacctcaataactgaccatcattttttcatttttatatatttaatgcctggcacaatatttgctacataaacagagttgatgaatacttggtgaagaaaataaatgaatgagtaaatgaaacacaagagttagctactcatgcatgctagattacacaataattgccagttataagtctcctgttttaactcaaaaataggatataatccactttaaaatatgcttgaatatggatgcagctggaggtcattatcctaatcaaattaatgcagaaatggaaaaccaaacaccacatgttctcacttagtagtagctaaacattaggtacacatgggcacaaagatgggacccatagacactgtggaccccaaaagggtagaggaaaagaagggagaaagggctgaaaaactacctattgggcgctatgctcactacctgggtgatgggatcaatcgtaccccaaaccttagcatcacgcaatatacccatgtaacaaacctgcacatgtaccccctaaatttaaaagttgaatttaaaaatataaaataaaatatgcttgaataaatgcctctaaaattataatgtaataaacatttaaaacacaaaggtataatatccacttaattacaaccattgttataggatccctggtaccaagcttagttttacttactataatattagaccggtatatcaaattatcaaatcctacttcaggaagtcctactcaggtattatccaaaatatctacctgatagcgacatatttttacagtatcaggcaaacctgaaggactgatcacatggcatcactgttaaaagtgatgaagtttaatagcataaaacaaaaacccctcctttgcttgtctcaaagcatactatatgtaccatctacagaaccctagttacctcacaccaagacagatatgccaaagattccacagcctcaatagcatgtgtaggatatctgctaataattacctcctccttgccatccgtcagccactatgacaaactctgggtttttcccgacatgagattaggcacatgagtatagaataattatatcactataattaactgtaacaaatcaaagacttttttttttaagttccggagtatgtgtgtaggatgtgcaggtttgttccatcagtaaacgtgtgccatggtggtttgctgcactgatcaacccaacaactaggtcttaagccagcctgcattagctacttttatcaaatgttatgggctgaattgtgtcccccccaaaaattcatatgttgaagtcttaatccccaggacttcagaataggatctttacagaggtaattaagttaaagtaggtcattaggcaggacccaaatacaatatgactggtgtccttataagaaaaggaaaaaaatgacacagacaggtacagagggaaaaaccatgtggcaatacagggaaaagtcatttaatattcaaaatggtcccgtatgttaatattatccccatattatagatggagaaactgaagttttggggatgttaaatgagatctcagatcatcctatgagcaagcaccaggatgcaggattcagatgggaatctcgtgactccaaatcccatccacttgttactttcagtggataagggactgaaggactttggtcccaactctgccctaaactagttgtgagaccttcaaaaagttatgaattttttgccatcttcatttattcatctgtaaaatgaaagactggaattgaatattacaagggtctatctaagggcctgctagttttaagaattttgctcaaatcatcgttttcaaactcctgaagaaattacttctataaattcattagaattgaaaggaaattcagtatttggagaatcacgattttgcccacagaattcaaggatttattggaaaaatatacatacttgcaaatgtttttgaaatattatgaccttaactcattttaaaaagtcatttatatagggcttgcatcccattcattaactttctgttgttaacattttcttcattctgagcttttaaagactgcacacaacttcatgaacaaaatacaggattaaaattttctgacagaaaatttaaattccagttttaaaatcttcagggagtaattaaatggtcttgaggggaaaaaaaacttggttgcagaccttagtttttaggtctgagaaaatggagtaaatggcttcctgcttgcgtggcaggaaagtttgcctttaaataagagattatctgtgaaatacctttgaactctgtggagggaagttgctgcatacattcaatggcaaggcatttattacaagctcacgatattaggctgttttttttttttttttttgccaatacttcctcagttttgaaaaattacgtgggttacttgatttgtattttttttcatacctgtagaagttagggtgcattgttttgacaggagcagggaagtattgtagaaaataatttttatcataatggagtatggcaggttatatgactgcgaggatcagaattgtgaatcatctcttgtgtgtcttcaagtaaataaaggcaatctgcccacggagcagaaaaaaaatctacaaactacaaactctgtccaatcatgtaaagacaaatcagccttcaggcaaatcaaatgtcttcattcaaagtctacctggatttggcactctgcccatcgtttcaaaacctcttaacaatacgtttcacaaatagttaaaaacatgcatactgaaaagcatacttttgcaatgttatttttaaaaacaaggaactctttaacccagggaagataatcacttggggaaaggaaggttcgtttctgagttagcaacaagtaaatgcagcactagtgggtgggattgaggtatgccctggtgcataaatagagactcagctgtgctggcacactcagaagcttggaccgcatcctagccgccgactcacacaaggcaggtgggtgaggaaatccaggtaaggctcctgacagcagctttagaagggtacttgctggagtgaattcgggcctctgattgctatataaagttgtaggcaatcaagcaacagagaactgcaagtttccaaaggcaatgaagtaggatacggaagggaaatcatggaatttccacaaaagtcttactggggcctttctttggctagagctggcacagtgtgacgttcccgagttagttcagagaaatgctttctcttttgcgaaacaaaatttccaagagtaggtgaatcctaggatttttcaagcctgggacagggtccagggattttcgtctcagtcaccatctaaagctttctttcccacgggctaaagcaaagccccataggcttctccactatgacacctcagctcggattgcccgcttggaatatattattgcaaatcagaaaacagttttctttctctttttgctgcaaagacattcttgttgcctctgcaatctttaaattcatgggataggctattagaggagagagctggttgctttcctgaagcatctacaaatagggacactaaaatgtcttgcaagttcattatttgctaaagacaagaagacagggatacggtgatgagtaaaaagtgctggcttcacataatgtgtgtgtgtgtgtgtgtgtgtgtgtgtgtacctatgtctgtgtgtgtctccaaattatcaatattttccatggaattgtgttttgaggtggtttatgcaggaaatttgcagagcagaatctattcacattacgaaaactcagtggagtgaatctcagaaagtcaccccacagcaggatgtttgtacagcaggagttatgttagccttccttgagtcatcctgccgtaaaacacaagcaatatatcaatagttccaacctgtgatctttggagatactgcaaggtcctaatagctacttggaaaacaagaactgtaaatgggctaagtaaataaaaatgccttaccatcaatttactattttttagaatatatatagatgctgttataaataaaagataaaatcaaatgtttgttgatagattcaaagaaattatttgccatatgtttctgaaccagccagtattccaaatgtataattattctcatgtaaaagttcttgatttttttaacattacaaagaagtctttatacaaagagggctgagaattgttgacttacagtgaacacttaggttgtttttgcaaaactctagaagacaaaagttattggcatttccacatctttgtaggtatagaaaatgaacaaagtatatccctgatttttgcttacatcttttctgagtaagacattttgtgcttacatactatggattagttaatcattggtcagttaaatacaaaacatcatttcgatctggtagcttagcaacacttaaaaaaaaatcagctaatgcttagcaaaggtttccactcaagatattagattatgaaaaacttcctgcttaacaatagtaattccttgcagagtttatttgacttcattcaaaaccattcaccaatactagagttaggtgccggggtttcatatttcctttttagcacttttagtgtttggttttatcagaatcccaaatctccagccttccatgttacggccccgtggacaaccttagtgacttgctagagcaactcactttgctccctccctccctcctcactcacaaaacttatcttgccatgtactttccttttcataggctttagtttttcctgggaatcaactgtggcataccagaaagaaaaagtaatttaactaagatatcagctaggcgtggtggctcactcctgtaatcccagcactttcggaggccaaggcaggaggatcacttgaggtcaggagtttgagaccagcctgggcagcatgacaaaactccatctctactaaaaaatacaaaagcatagccaagtatgctggcacgtgcctgtagccccagctccttgggaggctgaggagggaggatcacttgaacccaggaggtggaggttgcagtgagccacgattgtgccactgtactccagcctgggcaacacagtgagcccttgtctccaaaaaaagtaaatgtaaattttcttagctactagagtatgtatatctattttctcaaaatatatctctatttatctatttctatatagatatatatatctatatagataactctatatctatagagatctatatctttttgtctttatctatgtggatcaatagacagctatccatactatatacaaacagtcccaacttacagaagtttgacttaattttttgactttatgatggtgcaaaagcaatacacattcagtagaaactgtatttcaagtatccatataaccattctggtttttacttccaatagagtattcataaaaattacttgagatatttaacactttactataaaatgggctttgtgttggatggcttttcccaactttaggctaatgtgagtgttctgagcacatttacggtaggttcagctgtggtgttcagtgggttaggtgtattacggtagttcccccattatctgtgggggttatggtccatgaccctcagtggatgcctgaaaccgcacattagtaccaaacactacatatgctatgttttttcctatgcatacatatctatgataaagttgaaattataaattaagcacaataagagattaataagagctaataataaaacagaacaattacaacagtatcttataataaaagttaggtgaatttggtctctctctcaaaatatcttattgcactgtgctcacttattttggacgcggttgaccgtggttagctgaaaccgcagaaagtaaaaccctgggaaaggagagactactctggatgcattttgacttgcaatattttcagtttacaatgggtttattggaacattactcaattgtaagtcaaagaccacctgtattcttaggaaaatcccatggaacagagctatttacgccaatctcgtatgtccagtctcagcagagcctcagtttctggtatattccaccgttgtggggcaacctgcagaccctgaagactgctagttcaattttgtttactgattttggttggttttccatactagagttgccatggagaaaattccagtgtcagcattcttgctccttgtggccctctcctacactctggccagagataccacagtcaaacctggagccaaaaaggacacaaaggactctcgacccaaactgccccagaccctctccagaggtaggagtcagcttcttgttggcttccaactgctacttaattggaaaagatttcctctctcttggtgcttaaacctggttctaacctggtgccaggttatttttggttgtgttccttctagacttatcactgtttataattatttctactttctccaggggtttttcttcttctttagtatagggtctattatcccagtctttaccattgcttttcaacagctttgggtctgaatttatacaagcttcaaatatactgattcatttcattctaggttggggtgaccaactcatctggactcagacatatgaagaagctctatataaatccaagacaaggtaaagatcaggattactcagagctccctcaaagctctcaagagcaccacctagtgacatctagatatatgtgaaatcttactcattaaaatttgtctaatctctgtcttttaaagcaacaaacccttgatgattattcatcacttggatgagtgcccacacagtcaaggtaatttattcttctaagtatgatttcctttataggcttttagccttagggccagggttcagatcactcatgtttgtatctttagaaccacagttgcattaaagaaagaatattttatatagtaaaaacatatttaaaagtgacttcaaatatctccacattttgtgataaccattggtacatattttgaaaaactagttttaggattcatcttcaacttcttgatttctcttacagtccacattcaatacaccagcaaatactggctttatcttcaaaatatatccttaaaccagcaccagcttcacaggcatgaagcctgtgccatctcacagggccccaagcttagaaggttcccaaacttggtttaaacttggctatcattgtcttaaaagtcttagtaattcttcaacaaggggctctaccctttcattttgcactgggcccaaatccaaccacttcctattgcctccatgctactgccctggtccaagcccagatcagatcttgtctagactaccataacagtcacctaactggccaccctacagccagtccacacagaagccagagtgaggctggtagacataaatcagattccatcactcacgtgctcaagtggcttcttatcacagaactaaatccaaatttctgatcacaacctatgaggctgacatgatcaggccaatggctatctctcccttcctaccactctcctcttgctttcttcactctctccagcctggccttcgtgctgttcctcccacaggtgagctcattcccacctcacagctagtgcttttgcagttccccctgcccacagtggcctaccccaaaatggaccactccctcacttcaacgttagctcctcaggaagatctgccctgaccactcacagtttttaaaccctttgctttgctttatttttcttcaaagtacatatctctacctgaaagtatcatctacttatttctttgtttatggtttgtctcccacacaagtatgtgagctctgtgaaaaaacacatgcttttttttgttcactgcaccatccctagtacagaacacagtgcgtaacacatggcagccattcaataaatatgagctggagaaaaaaatgaattgatgaatgaatggatgaatgagtgaatagaaagcagaggtagtcaatgccatagatattacttcactaatcatttgctaaaaggccaaagtagaatactgtatttaaaatgcaattcaataagtaaataaaatgcaatttaactgaaaattgaacaaagcttttaaccaatgctaagatggatgcttaatgatttttctttatattatagctttaaagaaagtgtttgctgaaaataaagaaatccagaaattggcagagcagtttgtcctcctcaatctggttgtaagtttccttttcatcattactaacatttctctatggctcattacttgaaatggatgattcatttttcctatacatcttagttatactgcattaactgggattgcttccaaatatcccatctcataaattagagagaaaaaagatatttcgttgtattaataatccatttggtgtgtctgtttttatttagtaattaatcatcttagtttgtctgaaaaattatctcccgtagtcagaattttttctgttgctggaaggtttttgttacttgctgtgcctgtccctctatagtcctggcttctctacacccattcttaatcctggtcatctcttgggaagagacagctctctggctttccaactctaatcatgcctcttgtgctttagcttcatgcattcccaccttacttcaccactaccacccctcacggtgctcaagctttctgtctcggcaagttctttttactgtatacaaatgtttcattttccttctaaaagcaagccaacaaaaaaatgactctacctaatcatatgtccttttgagccctccggcccttcctcttcacaggttggcttccttaaagaccacttcgcaccagtagttcttccttgcctctcttccatgggctcttcctcttcctcttcctactccttaatgtgagtgacatgatgaatctctacttgacccttttctctttccatattttgtattcagtgaacaactccatctacaactgcctttaatcaattccgacacactaataattcctacatcttacccaaacatgaaacaacttccaaattgtctatccaaccatattccagatatctcataatcagcttaaactcagtatgttcctcactgcacattaatcatcttggtttgcgcttttccaatagctcttctttctctattccctattttactgaaagtggtactgtgctagattggactctcctacttacctacagcatgcaataagccctgtgcttctaaattccaagtattcctgctactagtcacttctctataaactcaggaccactattttagtaagcctctttcactttccctagcttactgtaatactgctaaatggctcctggtctacaagataaactctgtctaatcccacatggctgtcagagaagttgctttacagaccaaactggggtcacagtgcctcttctaacatccctccagtggttcttaactatttctgaacaaaggaaaacactatggcatggtgtgcaaagtcattcctaagccggcccctgaagcagctctagcaccttctttcgccactgccctcgtgcatccccccaactcagtccttccccagcacttggccataggagaaaatgctccacctgtcctctccatactcttccccctgcatgaagtgtctttcttttccacctaactgactcctgttcatttgtaaagattcctccttatccacttcagaaagtcctagtcggggtggaatctgcattctgggctaaatgtcttgctcaaggcaatcaccaaacctgcatatcctacaccgtaacatttcacccactgcatcctcaatattcattttcctacctgtatctctcaatagagtgtgcattcattaaagataagcaccatgccttgctaaatacagttctaaataaaaattgataaatggataaatgaatactcaagaaaatcccgtacttgtctccgtaatttctctagaaatgacatctgcttttttccttaatagcctcttatttcatcccagatgtcttccccaaacacagtaactccttccaaattctcccttaatttttttgctctttatcacatccattcagcactttatctcatgttctgctctatcttatttattatttcatgcttgtaacttgtctcctcatctgtacaataaactctgtgtggaagagttatgatatcttgagatgcctggccggaaatggacagattcttgtattaacaagtttgaaaacgactgaaaagtcaaagtaaactaaaagatgcttttctttttattttagtatgaaacaactgacaaacacctttctcctgatggccagtatgtccccaggattatgtttgttggtaagcggaagtgacagtgagataactcggaaacacatactagtgctgccatcctccttctctcctccccactgtcccttgccacgttgccatggccaatgtcatcactaagctctagcaaggagcatgacattcctttaagttccgcaacatattttctttagaaaatgtgagcttttacctatttccacacaacactttcttttctcacatgctaattgtaacttttcatcttctgctataatacttctgagaacaaagcaccctattcactatttaaacatattgataaatttcctgaatacgagaggcctgcaaatatttattttttaatccagcaaactttcactttgtgtgttagatttttctgacattttttatcattatttttaagaaagttaggaataaggctgggtggctcacgcctgtaatcctagcactttgggaggccaaggccggcagatcacttgaggtcaggagctccaaaccagcctggccaacaaggtgaaaccccatctctactaaaaaatacaaaaaaaaaattagccaggcgtggttgcaggagcctgtaatcccagctacctgggaggctgaggcacaagaattgcttgaacccaagaggcagaggttgcagtgagccgagatggcaccactgcactccagcctgggcaacagagcgagattctgtctcaaaaaaaaaaaaggaatatgaggtgggaaaaagaaatgaaaggagccacatgctccttcctgccactggtacttttcatatgctttccccacttccttctctgtcccccaatttcacatcattaactccccaatcatcattattcattgaccgagtcaaatccctactatgtgctcttgtagtcatactttcctcaggtataattttgcagtttgggggtggttatgtaataaatatttcccacattggactataagcccctatggcagggactgtacctatttctgctcaccatgatattcccaacgtgaccctgcagtaggctctccatcaatatgtgtttaattattgaatgaatgtactgagtttggctttgttcaaagtcatactgatttaaggacaatccataatgaaatccatcacttacaacaattcatgctaatcatatgattcacctgtgtaattcattaaaagtttacactgaatgtacaaagcagggaaaagaaaaacaagaaatagaaaaaaaggaagaaggctgaactaaagcactaattttataggtttagttttgtcagaatttaggacatttggaatcctaacattaaaagggaatttatagatgtctgttcataccttgtacaggaattctttgtacagcatccctgtggaagggcattttaacccacattcaattccttcagtcctaagaaccagctccaaggcagcttgctcttctagctccgtagtagccaccctgactacatgtttgaatcacctggaggattttaaagatcaagttgcccaggccacacctcaaaccaattaaatcagaatctctgggggtgggaggcaggcatccatagtgtttacagctctccagatgattccaatgtgcagccaggtgagctgctagttgggtatttaaaaagcccttcttaggttaatttcttacaaagattagaccgtgtctttgtatcctctgcaccaaacagaagtatagttggtcttaaatctggtgaataaatgtacatctgcttcttgtaatttatgtgtctggccttagtccaacattctgaaatgacagattgcccactccagtaccagcgacagactttgcaaacatgcagatggttctcacatgtcttccttgtctcattttcagggcacgtgtcctaggttctttcgattacgtctctcaaggcaaggtttccagatctctctgtatcctcacgcttcccttttggatgcaccttaattttaaaatacctctttttctcattaattagatcacttcaagttaaatacaaaacatggcaagatggatttaaatttagagggatataagtatacataagagaagaccaatctctacttttaaaaatgcagttaattaacaataaagtaaaatatagtgaaggtactatatgcttatttgaactttgctgttgttaaggacttgcattcctctattaactttttttaaaaaactcgttttgaaaactagcattggatgtgggtttccaatgatctagaaacatgtaaactacaacataatcgtttcaagaatttaaaataattttgcagtagagaatgttaatgttttcaccaaaaaaaaaaaaaacaccatgtcacccctaaatatatattattctgttttcaggttgccatagatagaacagaagggttcataaccttttccacaaatagcactgcacagctgttgatgtttccagccctgcatttgctactaactgccaggggctgggtagtagagtggatggatcagagctcctgtgagtgcagacacactccattccctcacaggacatgaatacatgaacttcagctccccggggcaataaatacaggttgtttgaaaacaaaccattccattcccttttgcttcatttatctttgcagacccatctctgacagttagagccgatatcactggaagatattcaaatcgtctctatgcttacgaacctgcagatacagctctgtgtaagtgtgaccttcaattcggatgttgcccaagagttgaacacctctattgctgtagtgatgggactagaggctgcatggtgaggtgagagagagctaggcttagggacgcctcggactcagtttgaccctaactagccttgcatcttcaggcaaatcacactctttccatctcaggtttgtttgtttttaatctcaattgaagatgaattatttagattaggtatctttttctctaggaggattctatgaccacattacctgattttcaggttttctgttaggtacacgagcacacactccttctatcacagaactgagtgtaataattgtaataatctgcatgtcttaattttttaaataacaaaagtgaaagaatgtgcagtccagcttaaaattaaattcaggttcagtttaaagatcagtttcaaagatgatccaaatgattgccaagaaaattaccttccctatggttgccatcaatggaagagagacagagagagagagagacactgacttaaggcagatgaggtacctcaatgcaacgctgtagctagctgtgacatctgattagtcctctgggaagaaaagtgggttttatcctaggaaccaactctgatcaattagtagtggctgcctagaactgcactgtccaatatgttaaccatttgccacatgttgctacttaagttaaagttagaaattcattccttcagtcacactagccatattccaagtgctcaatgcccggacactgaacatttccatcatcacagaaatttctattggccagtgctgacttagaacgtcatgttgggaagagaagtgaggccgtgtctaggaagcaggagagatcatcatggtccattagcaatgtttccagtgtgtgctggaccaggggaagcacattccaagtactgtcagccattactgagataataccatacattttaataagactaagctcttaaaaggcacgtgtcctacacaagtaatatcacaatcccttgtagaacaggcacttaataattaagatttgtaggaagagtgaataagcggctgttcaatgcctatcgagtggacatcttatttttagtagatcacatacctcattttgatgaattgctgttgaagaaacagtgacccagagtttgggctctggaacagtagctccattacttgttagctgtgtgaccttgagcaagctactcagcctctctctgcctgtttcattatgtatatataaagttctaatcgtgtttgtatgaggattaaagaattcatctgcataaagcacttggtttgctattatttatatttcccctacttctaaaacaatttacacacacctactaatagacatttcttttaaacatgatttaaatttacttctaaatgagccaaaattatcttctgctgctagagcttataaaaggattcttttggaagtgagggttggagatgaaggatctgggaaggaatgactacactagaaaactagattgtcacaaaagccatttcatataatttttttaaattacaataagattaccaactattcacctcatgataaaaagcatcctatcaggctgggcacagtggctcacgcctgtaatcccagcactttgggaggccgaggtgtgtggatcacttgagctcaggagttcgagaccagcctggccagcataccaaaaccccatctctcccaaaaatacaaaaattagctgggcatggtggagcacacctctaatcccagctactcaggaggctaaggctgaagaatcacttgaacccaggaggcagaggttgcactgagtggagattgcaccactgcatgccagcctgagtgggagtgagaccttgtctcaaaaaaaaaagcatcccattaaataatgaattgagcatccaagtttggggtttattatatcgatataacgcacgatggtgtcttgactctcctgcttttatcccccattagtgcttgacaacatgaagaaagctctcaagttgctgaagactgaattgtaaagaaaaaaaatctccaagcccttctgtctgtcaggccttgagacttgaaaccagaagaagtgtgagaagactggctagtgtggaagcatagtgaacacactgattaggttatggtttaatgttacaacaactattttttaagaaaaacaagttttagaaatttggtttcaagtgtacatgtgtgaaaacaatattgtatactaccatagtgagccatgattttctaaaaaaaaaaataaatgttttgggggtgttctgttttctccaacttggtctttcacagtggttcgtttaccaaataggattaaacacacacaaaatgctcaaggaagggacaagacaaaaccaaaactagttcaaatgatgaagaccaaagaccaagttatcatctcaccacaccacaggttctcactagatgactgtaagtagacacgagcttaatcaacagaagtatcaagccatgtgctttagcataaaagaatatttagaaaaacatcccaagaaaatcacatcactacctagagtcaactctggccaggaactctaaggtacacactttcatttagtaattaaattttagtcagattttgcccaacctaatgctctcagggaaagcctctggcaagtagctttctccttcagaggtctaatttagtagaaaggtcatccaaagaacatctgcactcctgaacacaccctgaagaaatcctgggaattgaccttgtaatcgatttgtctgtcaaggtcctaaagtactggagtgaaataaattcagccaacatgtgactaattggaagaagagcaaagggtggtgacgtgttgatgaggcagatggagatcagaggttactagggtttaggaaacgtgaaaggctgtggcatcagggtaggggagcattctgcctaacagaaattagaattgtgtgttaatgtcttcactctatacttaatctcacattcattaatatatggaattcctctactgcccagcccctcctgatttctttggcccctggactatggtgctgtatataatgctttgcagtatctgttgcttgtcttgattaacttttttggataaaaccttttttgaacaga

SEQ ID NO: 777 - DNA, 87786 bp, Homo sapiens
agtcagggtcaagtggtgttagcaatcacatcagcaccaaatggctcaggatgctctggtttcaaagcttataaaacagagggtgattcccttgggactcactcagctcggctccgaaaagcaaaggccagaaggcagcagtgagcctgggtccctgctgtgtagggagactcaggggctgggaagaaggatggaatcagaaatgctgaaggtttacgtgagctttgcaccgagcgcctccgaaccactgcctctgggctcaacagaacacaggggtaagtctccatgaacttctcaaaaagaaaactgggaagctttctgtcttgatgatttgaggacccactggtttcagaggtgccacatttggaaccagatccgagtctttaaggtttgtgttttatttgttcatgtcaaaatgtggcttcctgcttctaagaaaagaaactcaggctcataaaagcagcctccaagggcttcttggacctcaaattgcgctttcaaaatgtggtctgatgggttcagtgtaaatgcaccagaggcatgtgggatccatttaccttaaaatacacttgggcctaaaaattaagagaaaaacagtccagggcaaagtgtatactgcaaagtcaagctccaaacatttgggaaacagttctagaggctgctggaaccccaaatgctacttgctttacctaccccttgggaatcatcaaatgttattttttgtacaagactggggatgagcctgctctctgatcccagtgctgtgctctgctgtgcagttctaatggggcaggctgtttcctggaccctgagatctccaggctccctgtgcctattccttgtcagctttgccccatccaggagctgggctgagcttgtcaagtgacctctgctttgtaccactccatcaggtcctgaagaatgaagggtaccaaggtggaaggggcgcaggattaagagtagggacgcctgcaaaagctctcgtgttaccacctcatcttccaactttcatgtgggtgaaaacgttcatcctaaataattgcttctaattctgaagttttgtgattccttgaaatgtactttggggatgacagccagcatttccatttcactgcaatttcagagttttgcagtggtttgccaatcataacactttctaattggcacaaaatccacctacctgttgcctctcaggcttgggtaacatacttcagacactttcttaggtaagtcttggcccttggggtgttatttgcccagatggtaaaaacatttaagtaggtctgattatttcattttcagtggtttcaacgcatttttgtggcctgggtggttactgtaatgtgcccaagttgttcattctgagccaacggggtcacccacagagagaagacttgacaaaggaactctcctctactcccctcttgccagatgaaatattgtttgtaaaaggtctttgtcttgagaggatcacatactttggttaagaatccactttggttaagccggttgctggattcagagacatgaacaggatagacagtccaccgataactttataataacacctttttaataacacctttaataactttttaataactttaaaagttattaaaactttataaaaagttaatctaaaactttaataactttttaataacacctttagccaggggtttatgcagcatacacgacaaaactggaatataatgtggtaggtgcagtagcagggtccacaaaattattttagttagattttaaaaattattaagacatctgttttatacaagaaaaattcttatgaaaatttatagacatgtgtttgaaatttagaataagttgcctctgcttagaattattaagtattttgaaaggaaacactaataaatgctagataaactttttctttttgatacaatttgtgtttactttaaatgcaatatttttttatctgaaaaaaaacgtgagcacttagcaaatctcttcattattttggaattggccaatgcttataaactacaaacaaatatacagattgttccttgtgctgatatttttgttttcaaatttcttagtcctgttacttaacaaatggctgatatctttgttggaatccctgaacatagctaaaagatgtttttttaaaaaaaaaaaaaaaaaaaaaccaagaggctccaagacaaaggagtgcacagaggcaaaatttatcactttggtagcttttgcggggatgaaagcctccagttagaatgtttgacttactaatggttcttaataatgaatcttagccagcagccatcagagaaataaatcattaaagtgagaaaataggtgtcaacacaggagtgatctactgaattgccattttggtgttctttcagaggggaactgcatgttgacaggcagtgactttttcaggaatttgggatattcttgagcaataatgtaaagatgaaggcagggggctgggcacaggggctcatgcctgtaatctgggaggccgaagtgggcagatcacttgaggccaggagttcaagaccagcctggtcgacatggtgaaacccgtctctactaaaaatacaaaaattaggtgggagtggtggcacacacctataatcccagctactcagagactgaggcaggagaattgcttgaacccaggaggcagaggttgcagtgagctgagattgcaccattgcatttcagcctgggcaacagagcgagagtctgtctcaaaaaaaaaaaaaaaaaaaaaagatgaaggcagggtaaattgtacacacatacaaatacagtgccattatgatacctgtttattaggatttgagaaattaattaacattgatttaaggccacagagtcattggatcacttgattctgtttaaaagaagttttcgtttgggtaggattgttttggtttcaacctgttccttttttctaagtcttcgtttccaaccttctactcagaatgaatttgacattgcaaaactggcttgtatcacgatagctactatgctttaaaatagggtaggtgctttggcatctttggagttttaacgtatgaaccattcataatttatccctaaagcgagtgtggattgttttatttgtgaacgttctacatcccctgatctgaaaacttaccaaaaaagccaacattgagatgaagcagggaccccttttaggggcctccttccccctactcccctacaagcatggaaataaagcgaaatcttgagttcctgcaagggaaattccaggcacccagctagccctgagaagtaaggagcaacttggtaaacaagaaggtaatagtagcttaaaacaatagccagggaagttagagttgcgagatgtttggttccctccagagactaaaggtaacatcttaacatatatccctgagttgtttttcagaaacccagacccccaccaaatggatcccctggcatgcagacctcaggtaagggagaactgaggactgaattctgaggactgaattctgacctctgttctttattctgggtttttttctttttttttgccagggtctggctctgttgcccaggttggagtgtagtggtgtaatcatagcttactgcagcctcgacctcctgtcctgtgatcctcccatctcagcctttcgaggagctgggactacagctacgtgccaacatgtcaggctttttttttttttttttttgtagagatggagtctggggtctcgcttttttgcccaggctgatcttgagctcctggcgtcaagtgatcctttcaccttggcctcctaaagtgctaggattgcagctgtgatccaccatgcccagcctccattctttgttctaaactttttcctgaagggcctggaggaagtcacacccacaggccagaccccacattcttttctgctgaacccaagtcttttgacaaagcttcccttctttaaccaattgcaaatcaaaaaatctttgaatctacctatgactttgtaagccccccacttcaagctatctcacctttttaggccaaaccagtatataacctccatatatcgatttacaattttgcttgtaacttccactttcctgaagtttacccctgcctttagaaacccttgcttataagccattggggaggtcaggtcttaggcgtgagctgcccaattctccttgcttggtgtcttgctaatcaatccccttccttctcccactataaaactttggtatgaacgtttggccttactgcgctgggcaagcccactccagtttggtttggtaatgtcactgaaaccaagctatgatatttgtagataccttagatctttatggtgatgctgtaacctcatagttttgttttgtcttattttgttttgttctagttccacatttaaaaagatctcatggaggtttccgccccaaggctggcatttccacacagccagtctttctaagccagtctttccacaccagtctttctaagaagcagccctatgggccagtaacagctacatttttgttgagcaaaggcactattaaaatcatcatctacatctttcagtaaaaccataattagtcaaggagatcctttcaactcagaagtcatacagagaggtagactcctttgcttctggcttttgttgttgttgttgttctgttggaactttggaatgtgttatcttgttagggccttcaatgagattaaagaaaagaatccgggacatcatttttcaccataaaagctgggacttttcatcagtaggtggtgaagagttcccaggtgtactccaagaagttttggaacaataaggcacaccaaaaagaagcaggctgcctcatttggagtgactgcagggatggggcaggccgcagggaggagaggaagtggctccttccagcaaatgctgagccaagttgccttgtgctcctcacacttgatctgcagcagcaggaggcttccatcctaggaaattgcctcgaggctgctcttgatcttaattttcaccagatttccctcagccccactccgctcctttgctggttcaacaaagaccaacaaacctgttgacggctgaggtgaaaaccaagaggaaggcagatatgggtctgattctctttctcttcctcttcctcgcctgctcaaactctgaatccatgctttacttctttttctctttctttttttttttttttttttgagacagagtcttactctgtcacccaggctggagtgcagtggtgtgatctcagctcactgcaacctccatctcctgggcttaagcgatcctaccatctcagcatcccaagtagctgggaccacatgtgcccgccaccacgcctggctgatttttttgtatttttggtagagatggggtttcgccatgttgcccaggccggtctcaatctcctgagctcaagtgatctgcccgcctcagcctcccaaagtgctgggattacaggtgtgagccaccatgcccagcctataatttaaattaagaccaattgattaaatgagttaaaattacaaaattgagttgctgagtcagatgcaatgcatatatatacacacacacatatacacacatatacatatataaacatatatatacatatatatatatattttccaacgacatggtttcactctgtcacccaggctgcagtgcagtggcacaatattgcctcactgcaacttccaccttccaggctcaagcgatccttctgcctcagcttcccaagtagctgggattacaaacacccgccatcaggcctggctagtaaaaataggatttcaccatgttggccagtctggtctcgaactcctgacctcaggtgatccacacaccttggcctcccaaagtgctgggattacaggcatcagccatcatgtccagctcctgtttacttctgcataagagctggtgacccctttgcttccctccacttcctcctcttgtttcttcccctgcctctcttctctctcttctttctttctctgcactggcccaccttcccctccgtctgttctccatcccaaagttggaaggcagtagtcagggttaggtcctgtccagtgaaagcaaagctgggtccaagggacaaagcacaaagctttttatgcattattacttcttctgccttaaattcctcttttcttctctccttagcacacagaagcagtctctagaacaactcttcctgagcaaagccatagctttttgttgttgttgttacttgccctcttcctgttccggctttaaaaaagaaagtatctgtatcaacttatgtgaacatggtactttcttgtggctgttcttctgaggattcattctctggtctttctgatttccagtctctccatcctagaatcaatttccttcattccagtaccccttgtcggagatccaggctacctccactcattcccaaacatggacttcaaaacatctttccagcactccttttgtcccactccattatggtatccagcggcttgacatgatgcttctgttcttcatgtaatctacagcagagaggctgggaaaaactgaagtttctttaaatacaggacagtgcagtctccagaggccagagcctctttgccagtcacaaagaacccttaattgccttgtaaaatgtagtccagccctcttcacagattcgcagattacagagttattcatccaaacaatttccacgtactgcatagagggtttcatggacagtagccttgattcagaccaacctgtatctctgcaaccctcactacagaccactttttcacagtggagttgctatttggctatggcttaaaggatgacccagaattcctcaagcatagaaagaggggaagggcagtaagaagaccagtgtggttggaacagaggatacaaggatgtgtgtgtgtatgtcaggaagggataaaagttgaggctagattattcacaagactattcacctagttgagtttggacttcatattgtgcaggtcagcatttcacagaagactagcccatgaagatgctaatcaatgctccaagatcaaggagctcacttgtttaataagttggggatttgaatgctgaatcccctttttaaagagtcacagttgattttagaaaactgaaggctctgagaagtcctgcaatgaaaagaaaacctgcttaattttgtataaaggttaatccaactttttttttttttttgcaaggaaatgatttccccccttccccagccccccataacaaaacttaacatctccaggaacaattttccttggagtctggaattgctgctgtctgctatgggaagctgtggtgaggttttaattttgttttgatttttaattagggaagacacatcatcttgttttctactttggaaatggtgtatggagggaggggagatgagaattaagaaaaataattgcagttgttcacataagagacattatttctaaagcgatctttctaaagagtaagactgactaggtccttagttagaaccctactgacattccctctgcccacaggttaagattcaaactcctgaataggattgacaaaaccttccgtgatctggttcctgcctgctgctccagttccagctcctaccactttcccctcctttagaccaaattcttggagaaacaaacacatccccaacaaaccagaatggcttatgtactccctccagctgctcctgtctgagctcttctcattggctggaatgcagttcttctctttgcccatttggcaaatgcctattcatctttccacagagatcagcctctctaggaactttccagagccatccctgacctctgtggtctgtgcagcccaccaagcccccacccctgtgtagagggagtcacttctgctgtattaccagtgcccctgtggtgtagtttccacctggggttctaaatgcaaactcctgcatgatactatttgtgtgttgttcataatgtagacttacagcctagcacagtgcctggcccatagtaggtggtcagtgtcaataggttgagtagaatgtgatgatgggaaaatgcagagaaggggaaagcttcaggagaagtggaatgggtggaatcaataggtcttggtgattgatcgggtacggaggcttagggagccaaggcacaccctgaggtgagctaaagacctcaggaggaggagttttggtagaggggaaaggtgaatgtcattttaaacttacttctttttttttaatttttatgttttgttaaggtaagatttacatacagttaaatgcatagatattaattacacagctggacaaataaaacatgctgaattgaagatggccacatttgggtgaaggtattgtgaagatggccagcagtgtgtatgaaagcacagagtctggtgctagagaccgagctctggggtccttgtgggaagtgacaccaggtgcagataaggtgaccccttgcggtgagaagctccaaatatcccagtatcccgaggtggctccagatactgggatatctggagctctctcactaatcactaggatgttttcatcttcgtttggctgttttctgcttttgttttggctgggctgggcttccctcttgttgtttgggctattaaaggatcagaaactatgctggcgagtagaagggatatggaatgggatggccacagttaattgggaacatgtgtagaggacccactctttgatctgcataaccacgcttatgagagcagtttcttcatccactcgcagggggtcagtccatcacttcctgagtgagtgacaaagctcctatccctggtgactagggccaccacacacaacagatgaggaaagaaattctaagataaacaaaaatgactcatagcataatatgaaaactgaaacgtgcattaaccaagctatctctgcatcctgaagcagcagagtcatttgctaatgaactcattaggaaaataaatgttctcagttggaggttagcattcatttaccccaaagtatactgcatttaattaaaggtacaggaaaaattttcctggccagaggagttacggtgatgtgacaggaagatccttgtctgaaagtctagacatctttggttctttgtccaattctctctgctgtgtgacctagggcaagtcatctggcctctctgagcctcagatccttcttttgtaacctgctgaagatgtcgatgtcaaccctgaatcctgtatttactcaacttctcaacaaatattcttggctgggagtgatggctcacgcctgtaatctcagcactttgggaggctgaggcaggtaattgcttgaggccaggggtttgagaccagcctaggaaatatagtgaaaccccatctttaccaaaaaaaaaaaaaaaaaaaagaagaagaagaaagaaagaatcagccaagcatagtggtgcatgcctgtggtcccagctactcaagaggttgaagtgagaggatcacttaagcccaggaagttgaggctgcaatgagccatgatggcaccaatgcattccagcctgggcaacagagtaataccctatctcaaaaaacaaacaaacaaagaacaacaacaacaaaaacccaaatattcttcaagcttctactctgttctgggcactgagctggttaaatatccctgcatgaacacttttttgctgtggtccctggccaaacagctgttactcccaattcaatgcatggctctgttctttatgccaaacttggaaaagtgggctgggtaccactctggttctttagaggaattttgttgtggttcaggcgactgtacatcatagtgcgaatctgttgccaatagtggaaggaatgctgggattggagttgaatagacctgaatttgggtctcaaccctgccacttactagtttgtgacctggactaatttactgaggttctttgagcctcacttttctcatctgttaaatggggataataataccggctccagttgttttgagaaataagatgatgtgtgtggaggtgcttggtgtttttcttccctattgtctgagaaagcagcaggtgcccctacatctttcttcacgtcaaatgttccaaatacccaagccattcacccaagccacgactcggtttataaacggttcctgggacttgggagactaaagtggccccacttcggcattccctcagtgctttcctctcgttgcatttcagaaagatttgaaatcagacccatttcctggccactttctacaaactgggaatggagtttctagcaacgttttccctctggaaatacactatgggtgtaccagggaggtaattttaattatattttgttgagaatgcttccagaaaagtatagaatatagtccatgacaactgaaaggatctagaaattctgtcatgagggccaactgcctttacaatgaggactctgaggttggagtggggcattgactagctccagggaacgctgggagtgagtggcagattggcagatgggtctcttgcttgatctacctcttggtctagcgctctttctcataaaccacaggatctttccaatcctaaactgttgtaactacttgtatctcaagtgatctgaaaacagctggcttaatccacggggctctccttgccttttggcgttgaaggatatttcctaatttagaccacttctgtgacctttcaaggtaaggtaaactctggtggcactagggacagcaaaaaacaccaagaggccagggtatatggccactcaaatgagagtttagatagaataagcatcactggaaaaggatagagagaatccagaggccttggtggaagatggactgctgcctcttcggtctaaaggcctgtggtgcagagagggctcccatatggcactctgggctttgacattaattagggtcatgaacaaacagccacagtatagacagctctggggacagcggaggaaattgttagtgataccacatgaagcctcccaggcacagctctccctcctccctatcttccttttttcttccctaaacttgtctttttttttttttttttgagacaaggtctcactttgtcacccaggctggagtgcaatggcacgatctcacctcactgcaactacttctgcttcccaggttcaagtgattcttgtgccttagtctcccgagtagctgggactacaggtgtgcaccaccatgccctttctgtattttttagtaaagacagggtttcaccatgttggccaagctggtctcaaactcctgacctcaagtgattcgcccacctctgcctcccaaaatgctgggattataggtgtgagccaggacgcctggcccttaaaagtatcttgaatactttttatatgccagattctgtgttagagccttaaccctgaccccaaagagctggtgctttttcgtttccttgtctctcttcaaaaactcatctgtctttcatgctcatctctccaccttttgtccttccttctgcttcatctttttttctcctctctcatatgtctttgttttatttgtaacccagaagtcagctgtggtttcctggcctttgagatctagatgatattactttgaacttactccctgccctgtagaattccaaagtcttcccacacttctaaaaactcccataggaagtggagggagcttttattttcatggtcacttctgactccaacctcggcacttcccttgaattcgtttggttcacaggccatttttaccactgccacaactcccctcgccccgcaccatccaatcgtcccttgccagttggccctgacatgagattctacctcttactcaatttccataaaaacaaaaataaacaacactgtagtgagttgaatagtgtcctcctgaaaatatatgtctatgtggaacatcagaacgtgacctcatttggaaacaggatctttgcacatgtaattagtcaagttaagataaggtcatgctggaatagggtgagctctaaatccaatgactgatgtccttacaagaggacacacaaagatacacagagaagagggcggccacacaaagatggaagcagagttggagttttgaggctataagccaaggaacttcaaggatttacatgaccaacagaagctaggaagaggcagggaaggattctcccctagagcctctggagggagcatggccctgctgactccttgattttggacttctggcctccagaactgtgagagaataaacgtctgttgttttaagccactcggtttgtggtacattgtacagcagccctagaaattaatacagtgcatttgcatttgggtctgtaggcaaatttcctgaggatttgggagtggaaggtgggacagaagcgaacctgcttttcagccctccatccctgccgttccactggttcccacttcaaccacccatccttcctttcccctgctcaacttgtttcttcatctcctctttctacacagtccccaaactccaaattcatcctactctattatgcagaactccagctcccaaactcagctcccagcccattgttcaggtcagaacccctccagatcctcagctgcacaaaaatacgttgcaaggaatagcagcctcctctcagaagggagaggtgagtttaaaaagctatccctatccctctttggggaggactggctccttctctatttcctgtccttcagtctagcagaggcaatggggtgggctgagccaggctttgctctcccctactcctcagaatattcagggtatggattgtggaagtggagagggacctgtccgtctgtcagttagtctagactgataagactgtcccctgtgtctgaatgcttccctgggtgcttcaaggagatactaaaggaatacaagaggttgtccctccctagaggaacactccaaagacaacccttagtctttcttctttaaaaagctttgttcagtttgtttggtcttttgcatcttcaaataggaatctcttatgttttaccccctcctcctcctcctcctcctcctcctccacctccttctcctcctctccacctcccctatctcctcctccttcccctccccctctcctatctcctcctcctccttcccctccccctccccctcctcctcctcctcctcctcatcttatgtgtagagcttttaaaagttctgtcacttgctattttattttatttcttatcctcgtacatttctaagacccatgggtaagtatttttccttccagtttctataggaaataaggaaaatcaagcccagggtaaagtaagttgcccaagattatctgtgtttaagccacagaacttgccctaaactctaggccagtaccctgtctgcaaaccctatggctttcttagagtggtcagaagctgtgcctttagcctggaaaaacctatttaacttagatcagccatctcctgttagagctagagctgaagtttggttccacttcaaaaccacgctgtgttttaagacttctaacctatttttaaatttaagtttataaatcagtttttaaaactctgtattttgactctggattcagagaaatattcttactaggttacacgaatattttgaaactcagtacttacttttttttttaattcaataaaagtttgcacaaacaatgcatcccacaggagaagcttatgccagatcccagatgtttaacacgtttgcttcagatattaagagttcatggcctcttgtgcttgttaaaccaaaaaatgcaagcccatagaaatgatttttaataactaggagtgctgcaaggtcaggctgaattctgggcaactgcagcacttcaataacttttttgatcacagattgtgtgtgtgtgtgtgtgtgtgtgtgtgtgtgtgtgtgtgtactttaaaaaaaaaaaaaaatccaagcagagaattcagtgaagggcagcatgaactcttacttttgactcaatttcacttcaattgatacatgcagaaatgttcaaaaagttccttttctaattctgacatcaactatctagtttgtaatcacttacctgggtctgccatgcaatgaaccaaccatctactattgagtcttggggttcagaatgccattatcgcagtgaacatctactggggactgactgtgccaattattatgctgtgtatatatcatttaaccctcatacctggcaccttcactcctacaccctgagtcccagccaccttcctctctcaccttcattataggcagaatcagttacctggtccctctgccttcacctctgcccctgtcccttccattctattctcaacccaacagttggagtgatctgtactaaggtgaaatcagttcatgtcatttctcaactccaaactctccaatggcttctcagcctatttagagtagcagcaaatgtttaataacagccatgttgtgtttttgttgtcgttgtttgtttgtttgtttgttttttagatggagtctctctctgtcgcccaggctggagtgcagtggcgggatctcagctcactgcaagctctgcctcccaggttcacgccattctcctgcctcagcctcccgagtagctgggattacaggcacccaccaccacgcctggctaattttttgtatttttagtagagacggggtttcaccgtgttagccaggatggtctcgatctcctgacctcatgatctgccccctctgcctcccaaagtgctgagattccaggcgtgagccactatgcctggccaactctaccccatgttcttctgccctctcttcctacccttctctttctctttctcttgctccagtgggtctggccctctcactgttcctcaaacatgtcatgcaaatttcttgacatggtatggtttactggtcaagctaagattaaagcacacacattatattacatctattaaggtaggaaagtgggagatcatttgctttaaacaaccagttagtgatctattggtgggggtaacaaaattcaaaaattcttgatactctattctttcacaacaatctttgctttaggaaatgtgatcaaaggcaggtttcccgattgaaaaagttaaggctagtgaggcagagcatttttttttttagacggagtttcactgttgttgcccaggctggagtgaaatggcatgatctccgctcaccgcaacctccgcctcctgggttcaagcgattctcctacctcagcctcccgagtagctgggactacaggcatgcaccaccacacccggctaaggtttttgtatttttagctagagacggggtttctccatgttgttcaggctggtctcaaattcccaacctcaggtgatctgcccgcctcggcctcccaaagtgctgggattacaggcgtgagccaccgcgcttggccgcatttttattccaatagagtatgcctattgctgagagactgtctgttttcacaagtacaatgttaaggattgtgaaatttacattatgggaatctagtacctgtgattaacttattgaagcattgaatgagcaatgatacttgaaaactaaggccatcttgaatagttagaaaatgaatcattttgggaaatgtacttcagataattcagaaaatactttttgaagcactaaacctttaaataactttagttattttgatggatgctaaaaataaagtgtggaccactttttgtcttagtagctagactccaccacgtatagagttttacttcatgatgatccaggataaacattggtggcataatacagtgtggaggtctgtttgcccatatgctgaatggcaccaggctagtgtgcttcttggatctgcatgtcttctttgaataattttacataggcatttgggaagagaaaaagaagttataaataggcaattttcagcctgagaattttgtgagagcctcagccattgtgatacttcaaagggacaggtaagtttatgtgctaattataagtgaaagagccttaggtgatttttaaaacttccttcttcattccgacgctacggcaacagcatcaaacagctctagagcactggccacttacagaacttgggaccagacacaccttgacactctatttagaccacacagagggagaacaaccaaagaaaggttggagaggtactgtccacaaattccactcactttacagcttgtttataggaagctctgttcatgacactgaaattgtcattcagcccaagaccaacgtaagttgccagtgttaatatttatacacaccctgtattattgtaaagtggtcttcattatataattcgcatttaaatagtccttcagaacagtggtccccaatctttttgcagcaggaccagtttcgtggaagacaatttttccatggactaggggtgaggggatggttttgggatgattcaagcacattacatttattgtgcactttatttctattattattacattataatatataattagataattatacatctcaccataatgtagaatcagtgggagccctgagcttgttttcttgaaactagatggtcccacctgagggtggtgagagacagtgatagctcatcaggcattagatatttttttcttttttttccaagatggagtcttgctctgtcacccaggctggagtgcagtggtgcaatatcggctcactgcaacctccgcctcctgaattcaagcaattctcctctctcagactcctgagtagctgggattacaggctcctgccaccacacctggctaatttttgtatttttagtagagaaggggtttcacagtgttggccaggctggtcttgaactcctgacctcatgatctgccggccttggcctcccaaagtggtgggattacaggcgtaagccactgtgcctgggcaggcattagattctcataaggagcatgaaacctagatccctcacgtgcgcagttcacagtaaggtttgtgctcctatgagaatctaatgctgccactgatctcacaggaggcagagctcaggtggtaatatgagtgatggggagaggctgtaaatacagatgaagcttcactcgctcacctgctgttcaactcctgttgtgtggcctggttcctaataggccacaggctggtactgatccgtggcctggggtttggggacccccgctttatagtgtatgcttttgtgttttttctttcattcaccaaatatttgttcagtatgtactatactgtcctaggctttaaagtagacattagaaatgcaaagatgaatatggccccatccctccccattttcttattttgattatcatcatgactctgagaggttgctagggcaacaattataattatccctttttttttttaggaaagagattgaggctcagggaggctcttgcactgtcaccatgtttaaaaagtattaatgccagaacttcaactcaggttttctgcctctaaatcccattttttaaacccaatctttttttttttttttttgagatggagtttcactcttgttgcccaggctggcatgcaatggtgtgatttgggctcactgcaacctccacctcccaggttcaagtgattctcctgcctcagcctcccgagtagctgggattacagtcgcatgccaccacgcccagctaattttttgtacttttagtagagacagggtttcaccatgttggccaggctggtctcaaactcctgacctccggtgatccacccatcttggcctcccaaagtgctgggattacaggggtaagccactgtgcctggcctctaaaccccatctttaatgccataaacaaatactcagaggcaagcaattaaagaaaataaacatttatgcaaatcatagtcgaataaaaatgctaaagactcagttccaaagaatcttagagggacacagttttctgagtactcatattaaatctcttgtgtttaagtgacaagaactaaacatgtattaacttaggcaaaatatattatttatgggcttatacctggtgtgatttgtgtactagtactaggggaaaagtagaggtgaattcaaccaagaatgcaaccaagaaatctaatgcctttggaatccttcaccatctcttatctttacttctctcagcacatcaacttcactgtcttttattatggattgacctgttctacctgggaaacgtggccaccaaagtgtcttgtgtcactataaagaggactgttttttttttctagttacagttttaaaacaaattctagggaaggattttgattgaccgccttgggttagataccatctcatgaaccaatcaactcttactggggaagtgaaatagtgggaaatcacagcagccacgcaactttggaatggaggaagagtggtcctcatgatgagactaaaagcagatgtcgactctgagtctcctacacttaattcacacaaatgttttttcaggaaatatcctattaaatttctggaaattaaatgtttgctgaactccactacactgttgtgctgtgtttaaaggtggcagcacaaggtcaaaggtagaaacaggaaaaagccacgtagtaaaactaaggaatcctcattacttttagtgacatcctgcccagaaagtgaaaaaggaaggcaggatttgcagatggcccaaagcggtgaaagcaaaatagtgaatgttggggagatgatgactatgaagagctaggcatacagcattgcagcaacaaatgatacgaattttcaggcatggctgtagtcatcttggaaaagataggagtaagagtacagaaactcctggagctcaagaggttattaatcttctggtctactcccttcatttttcatgtgagtagacggatccagggagaagtaatcttcccaaggctatcataaagccttagctatttcattggcaaaaatgggaaaaataatgacaccaacccttacatatgtcaggaggtttttcttcagagagaaattggaataaagttaccagaagttggatagtgcattttcctcccactaggctgacacttgcaagggagctggaataaatacgcagatggctgatgaaggtaagacaggtaacaaaaatgggagatgccagaaaaggggataaagggaaggtctgcagtcacatgggtcttgaaagtagacaatctgtatcatgctagaccctcgactggcttacccaggatactcctaatcctgtgggttttctcttagttatgtgcccgggctggccaccacctgagggttttctcatttacctgtcccttctttcagatatcttaacttggtgaagcgactttcccaacatccattctatcccataagcagcagccatgtggtttgggaaattggtctcaatttaagggataggcctgattagtcaaaatgatatcttatcctctttgccagtattggttcaaaaataagcatgtgacctaattctggccaaagggataagaggtttgctggcttcttggaaagttactttctcttaagagcattccaggggaattcattctattctcttcacctgaattgaaggaggagggtcttcccctggtagccattctacaaccacaaatggaactagatttaggatgaaacttacataatgcagaacagagaaaagggaaggaaaacactcaatgctaaatggttgaattgcaaatcaatgactctgaaggctgatctatctttggatttcctcataggttaaccatattagttatctattgttgtgcaacaaacctttcccaaacagtggctcaaaacaacagcattttatcgttatttagtttatgaatctgcaatgtgggcagggctgagtgggaaaggcttatatctgctccacaaggggtcaggtggggaagcttagccaggaccagggggatccacttccaagacggctccctcacaaactggaaagtcaatgctggctcagtcagatgtgaaggtcatgggccttattcttttctacgtggccctcttcatttgggtctccacaaactgtgtgggcttccttagagcatggtagctggattccaagagtaagcacacaaagataactatgtagaaactgcatcaccttatctgacctagcattggccatcacatagcatcatttccaatctactttgctggttgaccagtcactatggttagcctagatgcagttcagaggacacaggttccagcttttgttgaaaggagtttcaaagaactgtggacgatttaaaccattgcagaaactaaaacatttccttttttttttttttctgagatggagtcttgctctgtcacctaggctggagtgcagtggcgtgatctcggctcactgcaacctctgcctcccgggttcaagcaattctcctacctcagcctcctgagtagctgggattataggcgcccaccacaacgcctggctaatttttgtagtttttagtagaatggtgtttcaccacgttggccaggctggtcttgaactcctgacctcaggtgatccgcctgcctcggcctcccaaagagttgggattataggcgtgagccaccgcgcctggcctccttgtttttatgaccattcgaattgggttttctgttatttatttggggctgaaagcatcctttttcatgggttttctgtttatctggggctgaaaacatccttgttgatacagttagtgtcacctcagccatgggcagcagaatgtccttaacgaacagccctcagtcacaatgccaattgtagcaaagttaccagtaatttgttaccagtaatttaatacaaaggttttgcaataatttattttttgttcttttcaaatcacagcagaatcaagcttaccacaataatagcagaagagtcatttatttaaattcaagtagaattctctgaatgggagtaaagggatggaatcaaagcgaggatgctccacagggcacgtgggagctttactccaggttgagagctgttgggctggatgcctcttttggtaagagagttggaaacaactttagagtttcgttgctgtggctcaaattctttttcttctccacataagctcctgtgaagccagtgcagccgaggacttgtcaccaggcatttgataatctctctctagttttgatggtctttcggtggacaagggaagagattaaaaaaaaaattcttcttgatcttctgtcttggtcctctccacgatgaactctacctaaatacaacaaatcattttttagtgtccactgtgtttttagcactctgataaggccattgcagatagaaccccaataagatgttactgtaagaatctagaaaataagtagagggcagttggagagcaatgggaggctacttaaaatccaatcctaatgcaggtgtgacagtcttatgaaagaaaggagagaaaaagctgagcgtctatctgttggatttcagggtacttccctgcccagaggtgcagcagcagatcccttgaccctcttctccccagctacctctgaagtggaccagggtaaacatctgatcaacgggtgcccaaccatagactagccagcaatttgtaccttgtgtgtggcctgactggaaaatatgagctgagcaaatcagattcctctcccagaaaactgggaagggagaagcacttacttctaaggtggtggctcctgagcccagaggctggatagatataccattgaggaagtaattagagaatcaggtgtagactgcagctttgagagactggtgactcagataagctgattgggatgtgcaggtgtgcaaaaagaagcagtcttcatggaatgcgaggctgaggggtgtctgggctaccttaggtcctgcactttctgatgcctgcttgttcagttctctgaatatgttcccatatatgttcccttacccaaagtaagggtaggaatagaataccattccctgccttttacttgagctaattggagaggttttctgttacttgtaaccatcagaattctgtccagaacaagtcaaggacccacagaagagatgacaattccaatgggctttgagtaaggaaacaaccttaagtctaggctttacaatttaccaactaaatctgtgacttaacaaaaggagcttgagctttagagtcacacatagctttgggttcaaatccaatctgtaccattacttctttgtgatcttggagaagttacttatctgtaatgcctagataatgcctactaattcttaaatggttgttgcaagaattagactagacgtataaacatatttatttatttatttatttatttatttatttatttattttgagatggagtttcactcactctgctgcccaggctggaatgcagtggcaccatctctgcttactgcaacctccatctcccgggttcaagtgattctcctgcttcagcctcccgagtagctgggattacaggtgtgcgccacgtcacccggctaatttttgtggagacggggtttcgccatgttggccaggctggtctcaaactcctggcttcaagtgatccacccccttctcagcctcccaaagtgctgggattacaggcatgagccaccgcacccagccaatgtatacacacttacttatatggaccattaacacagtgtttggcacgtagtaggtccatgaagaatgacagctattgtcatccccaagtatgttgatgtactatttggatgggagaaaggaagtaatctttgaccctggtccctgccagtaacataaggtggctttttttttttttttttttttttttttgagacagagtctcgctctgtcgcccaggctggagtgcagtggtgcaatatcggctcactgcaacctccgcctcccgggttcaagcgattctcctgcctcaccctcccgagtagctgagactaaggcatgtgccaccatgcccagctaatttttatatttttagtagagacggggtttcaccatgttggccaggatggtcttgatctcttaacctcatgatctgcccgcctcggcctcccacagtgctgagatgacaggcgtgagccaccacgttgggcccataagatggttttgatggaaacatttttatatttcccaacattttaagagtggctttatatattggggtgtgtgagtctgtgggcatgtgcgtttgtttggcaaggatgttgtttggctcttcctcccccgtttcctattgaagttgtattcactatgtcattgttattaatcaggcaagcaatatgagatgaacaggagtgatgagttgctcaggctgccaaacaagttcatgttttgtaggaaacgccaaattgtttcctggggggatgttacttaggaatggaagggtatgcctctctggccctcacagaccctgtcccctccctggagtgctgtcaactctcagggcaatgggataactctttaaaagccactttatggagctgccgcccaactgtgctggaaatatatttgcatttttttttcctttcttctggtaaaaatgtaacccacgtcaagtaggaaatggattacagagctcccacatttcctcaaaaactatcccaacatcattagtcccttcataagctagaagggtggaggaagatagtgaaaggctgggagtggtggagaaagagggaatgtctgaaaaaaaataggattataaagcattttgagcccctccctccacttctaattcatagagagactaacgtgtaaactaataaaccaaaggtcttaactaaaggcttaaaaaagatgtccttgaatattgggttcatctgccaaccacatttattcatgaattatctttatggatgtggagtgggtttaaaaacagatgaggaaagctttggcgtcctaaaactccctggggattttgctgggcgtaggtgttttcctaaaactctgatgaaagcagaagttacaaatgataggcttcgaatgttatttcacacagtgattttgagtggcatgtacaatcactaatattcagcagtaactttctgaaaagttgttaaatctttctcatctctgttattaaaaaatatttagattttatatctaacccaaaggacagaaaatttcaagtgaattgtattgagggtgagaaactgaatcctctaacttactattggctaaattggtgctgcccagtgacttgagaggggagtcctgggcacattggtctggaactctggggtcatgatggggttagatattctccattccagaaaatcatggtgggaggacatgtcaggtaactatttctatgtaacaaatattcccaaaatgccatggtacaaaaaaaaaatcatcttttatttctcacgcttgctgggcagctggggattagctgttctcagctgggtttacctggcatgactctgctttagggtgtcttaccctccttggagcagctggctggcccagggaagtcttctagcattggtagaagtacaagaaggcaagcagaaacacatgaagtctcttaaggcctaagtgcagaactgaacacgattacttccatttcattctgttgaccaaagcaaatcatgtggctgaacccaaaatcaacgggtagggaaatatactccactccttcagtggaaggaacttcaaagtcgtagcaaagggcatggatacagtgcatgatgaagtcctggggccaatactgtaacctactaaaaagaaggaatatgactaggactgtggctccagtaagtggaaccacatagcttatctgcaactgtgacaggttagtcccttctgtggtattgatggtagctatcatatctcaacgctaacgctcaatattcctcccaactctcctaattttcattccatttccctgatcaggcaaccgtttggttatcatttagcttcctggatagctatttcttcagggcatagtgttttggcagtaagatacatgtttgggccttgcaacaatcctatttctcattctatattaatagacagacatactattgtctacttctggtgagcctgaccaaacttccttcttcaagagagatttactcagtatgctaaaagagaaaaggaacaagtttctaagctcgaaaagctgaaagtcagttgttctattatgtaaattcagtgtgaaggcagtgggcaaccagtcaccctctcatggggagaccactactagggcataatttttacccaaatttctgtagttcctatagataaataacttcagcacttggcctttaatagtgtaggggaaggaggtcaggcgtggaggctcatgcctgtaatctcagcactttgagaggccgaggtgggcagatggcttgaacccaggagtttgagaccagcctgggcaacatggtgaaaccttgtctctgggcaacatggtaaaaacctgtctctacaaaaaaatacaaaaaattagctgggtgtgttggcatgcctatactcgcagctactcaggaggctgggatgggaggaccagctgagcctgggaggtggaggctggagtgagccatgatcgcaccactgcactccagaccctgtctcaaaaaaaaaaaaaaaaaaggtggaagggaaggatggatggtacaatctgcataatcttattgctaggtagccaagaacatgaatgatgtattggaggggtttaatcagggaagcagaaccactagagtcttactgataatgggactaatctcttgcagaattatgtgagaaactggtgaagtaaaggtctgaaagtggaattgaagggttagagaaaagtcactagccagccatcctgaagccctgtacaggtggacttgtaaggccagaacttgcaatgattctaggaagccgcacatgtctaactgctggagtggtacccaggaggggggctgtggaaaagtccatacatagctgccacttctggaggtctcccaccaagctctcaagtcatcttgggtcctctggccagcagggactagagttgggaagaagagctagacatgaggaggaggatgagcaagaacctcccagaatctctgtgtgtgtctgccaccacgtgtagtcatgaggatcttcagagggagtggctctgctccactttcaccttccaaatcttgcctcaattcttctttttggccaacctaacttggaaccatatagggaaataaatttggggaaatggagttccaacttaagcaagctgatgtgggtccagaagaatgcagggtcatttgcttcaggtttgagtcatttcttccagtccatacagaggtcacagaaataggggtttagatgtttctctgctcttctcagtgagtctgggagcctttgttcttgaatcctgagcagtttcatgtgctgtcatcctctttggaccagctactcagcctgggtgagttgatcatgtggttggtggaaaaccttcttttgtttttggattctctctttgtttcctccttcacagatttcctttgaccccactggtgctattgcctcctgctctaggtgctgaatatttctcatttacacctctaatacaactgtgtcagccttttagtgctatgaagtttcattgattattggggtttggaggaggcagatgggtgttttgaggaagggctttgtgggagggcactgagaaatgagactctcatgattagttctcctggtggagcatctgtgaccacccattatcccattgttaccttagtttagtgggtaacagttatccaggtaagatgatgagggagggaaagaaaaaagaaaaaagcaactcttctcactacaaatagttcctagcttattcaactatgtatcctgtggattaatggacaaattccttagtaagctattcaagaccttttggagcctagcctttttatttttctcttttcctgaatatatactagactttgagtaacactggatctcctgaagcccactcagggaaacccttcaaagtgcatgaaagagacagagaagtgcagataaagatgatgaagaaggcataatggtgactctgtgcttgttttcaggtcaagatgtcagcattctgataaggtggccatctgagagacagaaagctatgtatccataaagatttttctttatctacttgggacaaacttaaagtttctatgaccttaataagctctttgataaattttcatgttctatgtctcccatagaatgcctacagcatgagaaacatttttttggtatgtttaatgtaatctatatgtcatcattcatgacagtgcctatcagagtaagtaaatccaggtgttagaaaaaaaccccaaatattagtggtttaacacaataaaatatatttttcactcacatcaccatccaatcaaagttagtgggcagtggagagagctttgttctatgaagccaatcaaggacccagacatttctcccatcttgtcgtattgtgagctttagcaatggttagcatggtttagtccaaggttgtcatggaatggaaagagggagacagtggggtgaaggctcacctgttcttagttgcctagatgcagaagtgaaactctatttctgctcaaattccattggtcagaactggccacatgaccttacctagatgcaaggggagtggctaggcaaagcagtttagcttcatgcccagggagaggaattgaggtttggtgagcatccatgacacttttgaaatgtcacttcctctctgaagcaagtgcctagtactgcacctgttacatggcaggcactcagaaatattttttgaacaaatacatgaaatgaatgaatatgtataggcttctgctgttatgttctaaggcagaaaatgggaaggaaataattttgagagaagcaaaaatctgtctggtacccccaatgtattcatgaccatttatttgtaaaattatttcacaagcactctaggaatttatactctttgaaagctgttttcatttattcaacaaactgttgagtgccttctatatcaagtgctatgctgtgtgctcaggaaatagaggtggaagtcatcattcctgcccattggtaactcacttggaatgcatctagagggaagtgggaaaagaagccagtaatcacagctatgatgtaggcaccatgatagagatacagatggattgtggtggttatgctgggaaatggcacctaattgagtcaggaatgggtgttgtggggtttcattgtctagaagaggtggtatcttggttggatgaacatgagtttgctagttgatacctgtaagagaagggtagagggaatggtgtgtgcaaattcgacagtttatggaactgcaattccttcagtaggtcaaaaaggtgtgatggaaatactgggagataaggctggagaggtaggcttgggctgagtcacaaagcacttctaaactgcattaaataaagaatgaataggggtttagagtaggaattatgcgatttgtctctatcaaatgaaagaattgatacacacagtaatatctaagcagccacgttatccatattgaccagtctatttttctccttagatcggcctcaaataatataaaattgctaaattaaaaaataaacaaaaacccgttcatagtattttgaggacgatccttttgtgggaagagattagaaataagagcacaaagaaaggtgtacaatatcctccattcaagtagccttgcctcagatagaacaggaaggaggcccatttcaaggaaaacaaaggaattggcttcatgattttacaagaactgtatctgtcaatagagaggattcttctaggaaaatgttttaagatggactagggaagaaaactaggaacaattaggggagctcctgctcttggtacttctgcatcagtgaagagtttgttaaagttgttcatttaaggaaccaagcatcagctcacttcaattagtagttattgagcattcattcctccttcattcattcagcacatttcaatgacacttttgtgccctgcactaagtcaggtgctgcaaggaagtaaaagttatggtcttgcccttgagaagattcaactaacacatgaatctagtgatttctaaccaaggatgtgctctccttaggtatcaagggaagctgggcactgtggctcatgcctgtaattccagcactttgggaggctgaggcatgaggattgcttgaagccaggagtttcagaccagcctggacagcaaagcatgaccctgtctctataaaaaaatttaaaaatttagccaggcgtggtggtatgtgcctgtagtcccagcacacttgggaggctgaggtgggaggatggctggagcccaggagtttgagacagcagtgagctatgattgtgccactgcaatccagtctgggcaacagtgagagcctgcccaaaaaaaaaaaaaaaaaggaacaaatgagagagagacagaatgaatattagtctaaaacgccttggagttcaaagttcagattcaaatcttgactgtatgtttgggcaaccactaactggttgtctgacctttaaatattttcaactgcaaaatgaagataataacagctacattgcaatttccaggattaaatgagatgactcatgaaagttttgtgtgaacagtgcacaactttgcaaacatttgtgatacattattaaatgtgaacgtactaggagttgaaagcagtggttttcaaagtgtttgttgaaacactaatgcccaagattggaaacaggcctttctcaagaaaagagttctatggtcaaacacatttgggagatgcaggatcaaagaaagtaaaacatggttcttatgcctgtaaaatgctagtatgcattgtgaatctcaaggaaaacaaatattttgtgtctctctcccccacattaatgtgatctggtgatctacccctactcccactgcagcatctctaggaccttgagatggacagaactcactctgggaaagactgctctccagaaggaaaagtatgaacctttctttcaattttacagtcccaccacccaggctggcaccgtggctcaatgcttgtaatcccagcactttgggaggtggagcactttgggaggcagaggtgggaggatcacgtgagtccaggagttcaagactagcctgggccatataataagacttcatctctacaaaaaattaaaaaattagcctggcatgctggctcgcgcctgtattcccagctacttggcggaggggctgaggtgggaggatcacttcagccccgaaggtcgaggctgcactgagccacgggcgcaccgctacactccagcctgggcgacagaacctctgtcaaaacaaaacaaacaaaaaatgctaagccattcttcatcagacagtctaggaaactcatttccaagcagtgttgagatttccaccaaggaagcccagagaaaagggccaggccccccgctttaccagggttagaggggatccctcatagaatcgggggtgtgaggtgctgtggtggatacatttaatattctttccaagacacccattgatggcaaggcagtagcagatagcaacaaaagcagagagcagggctgatcctcaaagactttatagactttttataaaaactctaaaagtcaagtaacaacatgactactccgcttctaagtaaagtgtgcataaacatcgccagaaagactgcccctgcctccccaagtcagagaagtttcctcaggccaatagcttcccctctcttccccctcctaccgcttgtctcccttcttctcccaaaacacaccccacacctggcggcattttacaccttcccaggaaggggctgccaagcgcggagtcgcggaggacgcaggcgcagcgcggctcaggtacgcgggaggccccgcccctccgcgcccagcccttctgcgccactccactccccgccctgccccgccctgcctcgcccctccccgccttgcctcgcccctccccgccttgcctcgcctcgccccttagcgcccgtcccgaggggcggggcggccctggtgggtggtgtgggagtgggtacggggagggaagtggaggggagggggtaagtgatagggtaggggaggccctgggaaaggcaggacctcgaggcgcggccgcgcgaggtgaccggagtcacagttcccgcaggcggcgacagcagagcgcccactgcctccagcaggtaaccggccgcggccgcgcggcgccggcccagcgcgggcgtgggacgtggagacccggaggagggcggcgggacccgggcggggaaaggcgcggcgtggcttggctcaggtgcgcttctcccacctggcagctcgctcagggctgtggggggtgcctgtgagggcggccccgccttgcgggctggaggtgagtgtcagttctgtctcttttgtctttaactttctttaaaatggggccgtggtggggcccaggggctgttcccacgtctcctcagcgacgcctgtgtcgcgggggcctgagagagctttaggccccgcgacagctggaagcgcggtggtctggagggcaccaggggtgggcgacggggcgaggctaggtccccgctggccaggtgggcggctctgcctagggggacccgtgaccggggacggtggagaccccagcccaggcggggacggccgcgcgccgggcgcccggctccctgctccgtgctcgggcttccgacggcgcgtccaggtggtttctgggctctggggaaagagaagcgaatttcctttccctggcggggtctgatgagaagagcttcgcagagggtttttacctgtgatgtttctgaaactttgtgaagtggcgaaagggtgttaaaagtgtccctttactgtggtgtttgcaaaccacaatctacccagctaggttttagatttgacttctatttcttccaggttttcctttgctatggttttctttagaggaagatactgtggatgaactgtgggctatagtgcacaccgatagacatctgggtatagacaagatagatgccaagccaaaaccattgatttctttagaacatttaaaatacagcatataaaaggattgcttttgtaattgaaatattattctagttctccctttaggtaggcagttaatagaaatttgttttccctgattaatattgtagaacatagcctggaaaatattgagaattagcaacaacaacaaaatccatttaccagtttcatattttgatgtgtaacttcagcatggttaaaaattgctttttctggaaggagggagtaatgttgcttgcctttgagagctgggatatttgctttttatcatctcttttgtattttgtaatttttgctaatgaatatgagttaccttcataactgaggaagaggccataatacaaatttattctttgtttaacccttcatgaaaaatttaagtatatcttgtattttattgacttcatatgaattataattgtgcatttacgaataaaactaatattgagagattaattcaggtggagagaaaatgagtttgagattctggcgggacatctggcatagctgtctagtggatatataccaatagatatattggtatcaggttttctgaagtcaagatcagacttacaaatgttggaagcagcagtggatttgtggtggttaatcctgtaagggtgtaagaaatcattcaagtaagtatagtgtaagaagagggcaagaccaaggatggggaacaccagcattaagcgatgggtagagacagccaaggagtctgaggaagagcatcaggaaaggaggaaatctagggggcagtggtctcatagaagccaggagaggagagttttaacaaggagagaagtctatctgggagtcaagaactgattacgtgcctattgtctttggaagttaggatgggggctttaacctcagcagacataatttaagtacagtgtaagggtagaagccaagtttgaatgaatctgaggagagaatagtgattctgcactcacaagtaaatgtgagtttagaatccgtattttgagaaacaaaggttagaaggagaggcgatccattgattagggagatgattaaaaaaagaaaagaaaagaaaaaagagaaataaggatgatagactacctttgtgttatccataataattacaaattttaaaaacgaagtgcatcatttcataacattgttcctctctcatggttaagtagcagaagctgagagcaagaagctgagcatgttgaaaagaactattcgtggtaaagtagttatgccccgccccatccaaattatgaacacaattttagtggtgttttgtttggtgtattgagttcaggtgttatagtgtttaagtcacacatataaactgtgttggactctattttacctgagttccaatatgttgatgttctcaacttgcttttaagttatgcggttcttttacgtatgtcccaatggttcttctaaaaatcttatgtagaaatcaggtgttgggactaaagcagaatctgtgaggcatacatcatttagggcctttgcttcaattattattatgcattcaggggaaaaagctcttagattaaaatttctgtataatgagtttcacttcagtcttcgttgaaagtttgatttttttttgttgctcaagagttcagacaaatcattttatgagtattttccttaggaatatgaaaagaatagttaaaatggaaaaggctggcaaccaagtgttgatgaggatgtggagcaactggaagtctcataatctgctggtggaagtgtaaattggtgtagtcattttggaaaactttttggcattgtctgcgaaagtaaaacatatgcataagctatgcccaaacatatacccaataaaattctagaaaatgcaaactaatgtgatggaaaaacacatcagtggttacttgggggtaggggaaagagaaagtaaggagggatggatccaaaaggagtatgaggaaactttaggggatgatggatatattcattttcttgatgagatgatgcttctaccaatgtgtgtgtatgtatttatatgtatgtatgtcactcatttaattatacattttaaatatgtgaaatttactgtaggtaaattatacctcagtaaagctttaaaacagattaaataaaaataaagaatagaagaaaggcacatcatttaagtatatttacctccttcaaatactatagttatttcagggtaatataattatggataatttttattttattcatatagttttctgaatttttaatgttttgtaccacaaccatgtatttatttacttcttaaatgagaaattatttcatatgtgcaaaatagtacttttgacacatctacagattcagagaatacaaataaaataaatagccccgtgcctatgtattgcttaagaaatatacataaccaacattttttgaagccaacctgtgtattctccctgattatatctttttctttccactctccttgattctctatatggttttaccacatgtctatgcattccaaacactgtgttgtttagtctactttggaactctgtataaatgatattctactatgtgaatcctatggctttgcttttgcacattctgtgagattccttcatgctgatgtgttgtagtttgttcactttttattgccgcgcataatttcattgtgtgactttaccattctttatccattatcctgcggatggatatttaggatgttttcagtctttttttttatttttttgcttttaaatttaatttttacttttttccattaaaatctgtttttaagtgacccttctaactcatgtctctttgtgttcatggttttaaaaaccttcagttttgctggaaaacaccggattgttttataaagtggctgtaccagtttatagcctcacaagcgggatgtaagtgttcattttgttccctttttcagcaacatgtaagacacttctacattcgtaattacctgaattttttttcttttagacaatcgggtgagaaatggtatcccattgggggtttaatttaaatttccttaattactgatgatgttgaacctttcattgtttatgttttgtgggtgtttatgtctttggccatttttttgttgttgtttttttactttaaaacatagattttttttttttttgagacggagttttgctcttattgcccatgctggagtgcaatggcatgatcctggctcactgcaacttctgcctcccgggttcaagcgattctcctgtctcagcctcctgagtagctgggattataggtgcatgccgccatgcctggctaattttttgtatttttagtagagacgggtttttaccatgttggccaggctggtctcgaactcctgacctcaggtgatccacctgcctcagtctcccaaagtgctgggattaacaggcatgagccattgcactcggtctaaaaatggatttctgtaatagaagctctttatatattctggatgtgaatcccttgtcagttatgcacgtggcacatttctttttctccaagtgagcagcctgtcttttactttctttatagtgtcttttgattaacacgttttatatatagttgaatatagttgactctgtcaactttttgttttatggtttgtgcttttggcatcttgtttaacaaatctttaccttccctgagattataaaaatatagtctgatattttctactaaaagcaggggggtatatgggaaatctctgtaccttctcaattttactgtgattctaaaactactctaaaaaagaaaatctatttaaaaagttgcctttcatatttgtgtccttaatccatgtagaactgatttttgtatggtgtgaagtgggggtccagtttctttttttcccatatggctaatcagtttttcccagcattatagaactgaatattctgtttttcatttcagtgatctacaagtatcatagatcaagtttccatacatgtgtggtcgtttccaagctactctttctaaaacagatctgtttatgtatcttaccacagtcttatttactttagctgtttaaagaaccttgatacttgagagaacaagttatccacccatgcttcttttaaattagactgctcctcaaattaatgtttaatttttttctttttaaaaagtaataaaatgtgttatttaattcttaaatatctactgtaatcacctgaagtcataaataatactgaagctactctaatgtagactatatcaggctgcaaatcctttcctaacttactagaattaattttaacttgaaaaataaatataggatttgcattttgggaacagtgtaagttgtgaggtattggacaaccttagctgagaacagctaagaatgctgtatttaaaaaaacaattcaaaagataggaattaacatgccaaaatctaagagaaagctaaacgtatgagagactaaaggagcctttaagtcttacttgccttgagagcatttgctaaacaggggaaacttgatgcatttgaataggcacttggtatatttgcatgtcaccaaggatagttggaagtcagcccagggctcattcaatgtaggctaagaggctaattctgggaccacaaagggctgtgatgtcacgagaagggcgaaaaactcactctacctccttgaagggagtgcaaggaaagttgtcttgatgccaggtaaaacaagaaaggaaaaaaatcctgtccttgggaagttgtgaccaccaaacagaccatggggagaagttttatattaccttggtggtcaaaaatatttcaagatgtaaatttaaaaaatcatttcttttttgagatactaacataccataaaattcacccctttaaaatgtacaattcagtggggtttttttttgtatattcatttagctgtgcaactatcactatataattctagaacactcttgtcaccctcctaaaaaaaccttgtacccattagcagccattccccatttgcctcttccttctcagtcactggcaaccactaatctgttttccatttctgtggatttgcctattctggccatttcatgtaaatggaatcacacaatatgtggtcttttatgtctcacttctttcttagcataatgttttcaagatttatctgtgttgtagtgtgaatcagtacttcatttgtttttatggttgaatagtattccatcatatggctgtataccacattttgttttctcattcatcaattgatggacatttggatttgtttctactttttggccatcatgaatactgctgctgtgaacatctgtgtaaaatgtttttgtgtggaaatatgttttctatgctcataggtatatttacttaggattagaattcctgggtcatatggtagctctgtgtgaagtgtttgaggaattgccaaagtgttttccaaaacagctgcaccattttacattctcataagcaatttatgagggttccagtttctctacagccacaccaacacttattttttgtctgtctttttgattagtgtgtgtgaagtggtatctcattatggttttgatttgcattttcctaatgatcagtggcattgagcgcttcttaatgtgtttattggccatttgtctgtcttctttgcaggaatgtctaattcttttgtccattttagaattgggttatttgtcaacgcatgaattgaaaatggtctggtaaacaaatgcagatattctctggagtatactttcatttttagcttaaaaagttctaccagtacagtttcatggtcaatgaataattcattgtcaaagataaccagctgtacaaggaagtaggacatcctgagcaagaattggcagaatgatagaacctcgaaataaacctacaaaagcttgaaaaaccagtcatagatcattaagataactatactgggctgagtttaagtaaataaaagacagatttaaagatatgttcagagatcaggagtctaaaaagtgacagagctacacagcaggttgaaaaaagaactaaatgtaatttctactaatgaaaaatgcagtaataaaactcatctttcagcttaactactaattaggaaattagatgtactccacaaagagattgaatgaactggaagatagaataaatcattcagaatataactcaaagagacagaaatggaaaatataaaagaggtgaagagacatggaaattagagtgatcagagtgaggaattatagtgagaaagtctaataaactagaatttctgcaagaaaagaaagagaaaagaaatgggcaaaaacaatatttaaagagataatgaatgagaatttttcagtactgaggaaagacaccaatccgtatattcaagaatctcaatgaatttccagcaagaaaaagtacatacttagaaacatcacagtgaaatgaagaaaaccaaaggcaaagagaaaaatcttaacattactttagggcctagacaaaagatttttttttttttttaaaagaacagtggttatgctagcagctgccttctttataacaatggtgggacagaagacaatggaataagatatttttgtcttaaagaaaatagcttataatttagaattcataaccagaggaaatatctttaagaatgagagtaatacagggtgatgatcaatggttgctaacactgttaaaaaataaaagctgaacattatgtacctacaacctatgtagtagtcttactaaaaataaaaagtcaaacctaaaaatctgtattaagttatagattgaactataattttacagaaaaataggcagagatttgctgaatgacaccatgggaatgcaatcagcaaaatcctattatgataaactctattgggtaagagacctggtttcagcatcagaatactttcaaggaaacttgtagattaaaggagatttaagaaatatttaaacctatttcactcaaataagctatacaaaattataggaaaattggggaaatgtgaatactaatatgaggaaattatagatttttctgaaagtgtgatggtactgtagttgcattaaaaaagagatatataatataaatataaacataaatgtaaagttatatttggtattagatgttcttcaatattgtcttttagagatacatactgaaatattagagatgcatactgaaatatttacagataaaattatatcttgatttttgttttcaaaatttctggaagtgggaggatattgtggaaaaaagtttgactatgagttgataataattaaagctagataatgtgtccatgtggatttattttatatttgctatacttttgtatattattgatacttttcacaaaaaaatataaaaatcagggacattttcagatcagcaacaacagagggttttctaccaacataccttcactaaagtaaatcataaaggatattagcaagaagaatgtgattgtacatgaacagttggcgatgcaagaaagaatgaaatggaaggaatgtaagaaggaatgaagtggaaagtaattggtgaaatatgtttgtaaatacaaatgaacactaattttacaaaagaataataatgttttgtggggttttaacaagatagaatcaaaatatgtgcaatgatgacatcatgcctaagtcacacatggattgattggcatgtaaaggagctaaaagtcttttaatagtccttttactatgcaacaggagaatataaaaggactaactttagactttgacatgttaagtgtgtgtattaaaacaaccagagtgactatttaaataaaaggaaattgagtttataaaatttatagtatacagaataatggcctcacaaagattaccatgtcctaattcccagaacctgtgaatgttacctcacatggaaaaagtgactttacagatgtgatttaggattttgagatggggagattatcttggattatggagtatccaggttggcctaatgtaattgcaagagtctttataaatgaaagagagattgtaggagattcggagttagagaagatgtaacaatggtagcaggggtcagggagactggaagatgctgtcttgttggctttgaagtggaggaaggggccatgagccaaggaatgcaggtttcttctagaaactggaaaaggcaaaggaatggaatttcccatagagcctccagaagtaatgcagccctgccaacaccttgattttagctcagtgaaacccatttcagacttcaaacttccagaactgtaagatagtaagtttatttaaagccattaaatttgtggtaatttgttgcaacagcaataggaaagtaatacaatatccaagctattggagggaaaaaaatgaagatcataaacacttagtcaatccaaggaaggatgaaaggaaagaaacagagaacaagtaggacaaatagaaagcccaggataaaatataggtttaaattcatatatatatcagccagttatcttaaatataagtggaataaatattacagtcaaaagacaaagattgtttatctggactaaaacactttaactaaatgctatttataagagacatatctaaaacatgaggagacagaaaggttggtaaacaaatggaaacagtaaacagaaaaagatattccatacaaatgctttctaaaagaaagctgcatagctataactatcagacaaaattgttttcagggtaaaagcatttctagaaattaaaaagttaccataatgataagagatttaaatcaccaatatgttaaaacagttttaaatctttatgactggactaaatacagttaaaatacaaataaatacaaagattgtcagagtggatagtagaacacaatctaactacatactacttataaaagacaccttgagcataacacagaaaggttgaaaagaaaatgatggaaagaagatataacatgcaaatattaactgaaagaaattctagttatatcagacaagccaacattaaggcttctagaagtattactaaagattgaaagggagattaataaatttatatgtacctcataaattagaataaaaatatatgaaacaaatctgatagaactaaaaggagaaatagatatatccacagtcatagttggagttttctttttagatgcatctcttttagtactatataaaacaagcagaaaaaaaaatcaatagagatacatatttttttcctgctttttttttttttttcagacaaggtctcaccctgtcacccaggctgtagtgcagtgatgcgatcacggcttcccacagcctccacttcttgagctgaagtgatcctcccacctcagcttcccgtgtaactggaactacaggtatgcactactatgcctggctaattttttaattttttgtagagataggggtctccctatattgtacaggctggtcttgaactcctggactcaaatgatcctcctgcctcggcccccacaaaatactgggatttacaggcatgaggcactatgccctgccaagatacagaagattttaacatgaccaacgaatttgatttagtgatgtacatggaacattgcacctcaaagttgcaaatgtacatggaacatttattaaaattgatgatatactatgaatatcattgattgtatacaatttctctgatcacagtggaattcagctacaaatcaatatcaataagatagccaggaaatctaaattaaagaaaaacaaaagaataagacagatggagaactgaaatagggctttgttattaataaagctaatttagatatggcatgtatctgcaggcaagtaggttttctaatacagacaaatctttctcaaagaaactagagacagcaagaagcattcctaccctaacgtagttcaaaggtgcaaaagtaaaaaagagaatggtgtgtttctagcacatcaggtagttatattttgaagcttggtatttgcagaaggaagtagtggaagatgagcaagagaagggtcacatattgtatttagcagaataaattttatcctgaaagtgatagagagatatagcattacttaaagcagacgaaggaccttagcagcacagtggggggataaaaagaatttgaaaggcaaacctattagctggctctctgtaatttggggtatcataacatctgaatcaaaatagtcaaattgagaatagaaaggaaggtgtgaaaattacaaggatggccaggcgcggtggctcacacctgtaatcccagcactttgggaggccgacgcgggtggatcacgaggttaggagttcaagaccaacctggccaagatggtgaaaccccgtctctactaaaaatacaaaaattagccgggcatggtagcgggtgcctgtaatcccagctactcaggaggctgaggcagggaattgcttgaatccggaggcggaggttgcagtgagccaagatcgcaccactgcactccagcctggatgacagagcgagactccatctccaaaaaaaaaaaaaaaaaaaaaaaaaagaaaagaaaaagaaaattacaaggattaaggggctctactcaacagaattctagcccttgcctatttcacagttcacctgctaactactctttctgttgcttagtaccttgcaaaataatgcaaagtgggtacaactcaagatttttgcaatttctggaatgctccaccatcaagaactttgctagctgatcctttcttgtgtttatgttccagctggattgttacctcctcagagaagtcttttctgattatacaaagttaacattcattccttttgaatcctggttaattttcctcattggattgaatgtatcatgtgtttgtttatttttctgtttatctccctcctctgttgtaagcgctccaaaagcttgtctgtcttgttccctattttgtcttcagtgcctagcaaattgcctagtacatagtagatgctcaataaatgcttgtaagtgaatggatgaattggatgtgtggattttgggagcagaaggactcaagaatggcacttgtatttctggcttagttaattagctggatagtggcactgtagtaggaaataccagaggaaaagcaggtttgcaggggaaagtcgtgatgatgtactgtcctttatttgtgagaataccatagacaggctgttcctagactatgtcagaccagcagaggcaaataagccctttgggaatctcaaaaggaagtgatattaaaagtattttaacaacttgtcgtgcatgagcactgactgtaatattggagcagagtcatggaggcccctgctttttcagacatttacctcaggggtgcctagggaggagttaaagtgactagggtgtttatagcttttatctattgatatggaagtatttaagtctttttacaatctgtcctcatactagaatgttctagctaaatgtccccatatcatttctggcattgggtaaagtgcctagcatgaatcagatctgttgtaagtgggatctgatgataataaatataataatgatgccgctgatgacagcaaacatttattcttaaaacagccctaccactagttttatactttatgtgcattactttggttgatcatcacaatagccctaagaagtgttttgttgttgttgttgttgttgttttttaattgatgaagaagttgaaggttaaaaaggttaagtaacagatttaaggtcatatagctaataagtgaaagttacaggattggaacataggcagtatacttttaaccatttatatttgtttctccttgttgctaaaaaagcaaacatgtggctatgtagatagccagcacatagtctgttaacctgactggtcctgcccttctacccataccctacctaaagcaatgtggtgtattagaaaaagttgtgaagcttagggtttggttctaaacctaacattatctagttgcttgactcattattttctttgggtaaaattagaaggactttgataaaatgatttcttttttctttttttttttttttgagatggaattttgctcttgttgcccagtctggagtgcaatggcgtgatctcggctcactgcaacctccgcctcccgggttcaagtggttctcctgcctcagcctcctgagtagctgggattacaggcatgtgccaccatgcccaactaattttttatttttagtagagatggggtttcttcaggttggtcaggctggtctcgaactcccgaccttaggtgatccacccgccttggcctcccaaagtgctgggactacaggcatgagccaccatgcctggcccctgataaaatgatttctaagccttcggctctgctaatgtttttgaggcctctttttctgttaatgttctgtaattctacttatgtattattttttcaggtttattgaggtctaattgatatgtagtaagttacatatacttgaaatcgataatttgatgttttcatgttttcatgtatgtatgtacctatgaaaccatcaccacagtcaagataatgagtataggctcggcacggtggctcatgcctgtaatcccagcactttgggaggctgaagcaggcggatcacgaggtcaggagatcgagaccatcctggctaacacggtgaaaccccgtctctactaaaaaatacaaaaaattagccatgcgtggtggtgggcacctgtagtcccagctacttgggaggctaaggcaggagaatggcgtgaacccagaagacagagcttacagtgagcagagatcacgccactgcactccagcctgggcgacagagcgagacactgtctcaaaaaaaaaaaaaaaaaagataatgagtatattacccccactccaaagtttcctcctgccccaccaagtccttcctttctgtccctctctgtgcttcatctccccactcctcactgtcccgaggcagcctctgatctactttttgttactattgattaatttccattttctacaattttatataaattgaatcatgcagtggagttcagctacaaatcagtattaataagatagctagaaaagccaaattaaagacaaaataagaactgaaatatgactttgttattaataaagcaaatgcaagagaatatggcacatatctgtatggcacatactctttttgttggcattcttttgcccagcataattattttgagattcatccatattgttgcatgtttaaccagcttacttctttatttctgagtagtgttccattgagccacagtttgttttctaaatggattaatctgttgatagatacttgatagttttcaatttttggctattttgaatagatttgctatgaacaccagtgtacaactctttgtgtaaacatgtgattgcttttttcttaagtaaatatgtagtaatggcatgtctggatcatgtagcaggtatatgttcaactttagaaacttgtcaaactgttttctaaagtggtcatgccattttacagtcccaccagtagaataggagaatactacttgtcacatatcataaacatttggaatggtcaatctttgtaattttatcctttttaatcaatgtatattgttgtctttttatagttttaatttgcattttcctaatcactaactgtgttgagcatgttttcatgtgctttttggccacttgtagatttttttggagaagtgtcttttcaaatcttttgcctattttttaattgggttatttttctttttattattaagttgtaatagttttttatatatgctggatataatccatattttattggatgtgtgatatgcaaatatcttctctcagtctccgagtggtcttttcactttgttaatggtgtcttttaaagcacaaagtttttaatttcaattaaatctagtacatcaaatttttctttgatcatgtgtgcttttggtgttgtgtctaagaaattactgcctaacccaagtttacaaagatttactcctatgttttcttctaagagttttgaagttttaactcttacatataggtgcataatcagttttgagttagtttttgtatatggtgggaggcagggatccaatttttttttttgtgggaagggcatgtggatataatgtggatataaatattgatattcagtgtcctagcaccatttgttgaaaacactatttctttccctttaaaatttcttggcacctttgttaaacatcaattgactataaatgtaagggtgtatttctgggctctgaatttaattctattgatttatttatctgtccttatactaatattatattgtcctgatgactagttttgtagtaaattttgaagttagtctttccactttgttctttttttttccccaagattgttttggctattctgcaccctttacgttcccatatgagttttaggatcagcttgtcaatttctgtaaaaaagctggaagggattttggtagagattgtgttgaatctgtagatcaatttggggagtattgccaccttagcaatattaataatattaccattttaatgatattacatcttccaatccatgaacatgggatatcttcacaagtattgagctcttctttaatatctttcagtaatgtcttgtggtttgcagtgtataagtcttgtacttcatttcttaaagtatttgtattttaagtttttaaaaatgttattatgaatggaattgttttctatttcatttttggagtgttcatggttagtatatagaaatgcaattaacttttgtatatttctcttatatcttgcaaccttagtgaacttctggtaagtttgttagtgaatttcttagattttttttttttatttacaagatcttgttgtctgtgaatgaagagtgttttacttcttgatttccaagatgaatgcctttgacaaaatatttttagcctaattggcttagctagaatctcaaatatagtgttgaataaaggtagagagagtagaaatcttttttttttttcctggctttagagggagactttcaatctttcaccagttcctgtgatgttaactatagattttttcatagatgctgtttattattatgttgaaagattctcttctattctcagtatttttatcacgaatattggattttgtcaaatttttgtatctattgagattatcctatagtttttgtcctttattctgttaatatgatgcattacatgaattgattatcagatgttaaactaatcttgcaatcctgggataaatcttgcttggttatgatacataaatcttttatacgtttctggatttggcttgccagtatttcattgaggattttgggtgtatgttctcaaggggtatccatccttttatttttaacttatttgtatttaaaatgtttcttgtaggcagcatatacttgtatcatacttctttatccagtctggcaatttctgccttttaattggcatattttaaagtattcacacttgtgattcttgatataattaagttcaaatctatcatcttgctatttgttttctactcatcctatctgttctttgttccccctttctttttctgctttcttttattaattgagtattttaaaattattccattttatctcctttgttggcttataagctgtaactctgttttcttattttagtggttgtgttagggtttatagtatatatctttaactttctacagtcagtcctcaaatgatatgataccacatcacatatactataattatttacatttttacttttatttctcccccggcctttgtgctattgatgtaatacattttagttttacatatgttacaaaccttttgtctcagtataatttttttgtctaagctttaataaacttgtaaagaaatcccaataataataaatcatgtatttatacttatggtgcactttattcctttgtgtagattcatatttctatcagatattatcctttggcctgaaggacatcatttaacacttcttgtggtgtagctctgttggtaatatgttctttcaacttttgtatgtctgaagaagtctttatgtcacctacatttttgaaagattttctctgagtgtcaaattctaggttgatgggtttttttctttcagtacattaaagatcttgctctactgtttttgttttgtttccattgagagctatgctactatcctttttaattaattaattaattttttgagacagagtctctctgtgtcacccaggctggagtgcagtggcatgatctcagcttattgcagcctctgcctcccagattcaagtgattcttatgcctcagcctcccgagtagctgggattacaagcacacaccaccatgctcaactatatgctgctattcttaatctttgctttgatgtacataacatgtcttttttctctgggtgcttttaagattttcccatcactgtttttgaatgatgttattatggcgtggtgtgcattggtgtagttttcttcatgtttcctgaccttagtgttggcggaggttcttagatctgtggtttgtagttatcaagtttggaaaattttggccattatttcttcaaatatgccctcccccctatccccagtcttctttgtggactccaaatacatgtattttgggtcacttgaaattgtcccatgagtcacagatgctttttatcattttgatgttagtcttttctctgtgtctcattttagttagtttatcttactatgccttcaagttcattaatattttcttttgcaatatccaatctggtattaatcccatccagtatattttccatctcagacattatagttttcatctctagaaattggatttgggtctttttaatatcgtccatatctctacttaaccttttgaacatattgagtccagctataactattttagtgtcctcaactgccttgtctcaattttaggttgtttctaattgattgatttttttttcctcttcattatgggttctatatatttttttgcttccttgtatacctggtactttttttaattgaataccagacattgtgagttttaccttgaatgctggatatttttggatttctgtaaatttgctttgggacacagttaagttttgtgtaaacaatttgatcccttttccagtctgatttgtggggacaagcatcactcctgaccttggtgaataccagttatgtatagtttttgtaaatttttctggtgtttttttcccgcagtcttgtgtagcttcctttttttgtgtgtgtgctgatcagtactctgttgaatacttgagtgggaccctctgctgatctccattgttctctgtatgtacctctttattctacagtagtctgttatgcaaactctcgctgccttattctccacatactttcagctttgtctcttcatttcagaaaatcttctcggctttgcttgggtaatttcccatggcctggaaactccctcaagggagtaaggtggaaggcttacctcatttagttcctatttctcagttctttgctgtctgatagccagtgtcttgaaaattgctgttccatatattttatttgcttttcaggtggtaggataaatctgtctctgttactctattttgtacaaaagtaaaatatccatgtgttttttaactgtctttcctgtagtgtattactgggtgttcattttaattagatttcacatttcattcatataaacttttctctctttctactaccttcctccatcttccccaactcattttggatgactcaaggccatcaatgttgaggacttttccccctgaagtagcagtcatttttaaccaattctaccacattcctgtcatggttaatgttaaatatttgcaaactgattggggtcagagatgtggtttgatgaatatattcttagtttttatgggagatagttgtactttgtttccttatctatcaactaggtatttgctgagttccaattatattcccagcatcatgtagtgtgctgagtgctaagcagaaagtgagtacaatattgtttttgagcagtttatgttctaacaggggagacagaacaagatctcataaaatgttaagaaaaatgttaaactttttttttttaaagacactagacatttagagatgagagactattcgtttgatttgggtggttacggagtattttactctgatatgctggggctgaacagggcctttgaaaacgcatacattttaaaaatggaaatagtcacaagatgtaatggaagagaagataccatttatgatagccaagcaaattatacaggcatacacttaatgagaaatcttcagaatttttatgagaactctaaaaactcctaaaggtataagcataaacttgaacaaatataaagatatactatgttctgtgtaggaagactcaatattcttagagatgtcagttttaaaaaaataatttagaagtttaatatgatcctgatgaaagtaccatcagatttttcctcctagggctagacagattataaagttcattttcgagaacagacaagcaagaatagctaagaaaatgcagaaagtgaagaggggtaaagatgacttgtcttgctacatgttataacatgatataagaatttaagattaaaatgatataccattggtacaggaatagacagaacaattgaagagaatagaaaatacacaataaacccaattgcatatggaaatttaatgtgtactaaagggagcatcctgtaagtggagaaaatatggaatttttaatatgtggtgtttgtgctaatgagatagcgaattgggaagaggaaagtttgaatccatttctcatactgtataacaggatgtcagtatagaaaataatactgtactaagtactggaagaaaacatgggtaaattattttatgatttgtataacacacacactttggcatagcagaaacaccataatcaaagtaaaaagataaatgacaaaccagaaggatgtttgccacttgtataatggacaaagtgttaatctctcaaatatctaaagagcttcaaaaactggagaagaaaaagaccaacagctttatgaaaatgtcggcaggagacagtgaatagaattcatataaacaattacagattaatcttatatgacaagaagctcaacatcacttataataagagagatataaattaaaacaacacagtatatcatttctttcctatcacactggcaaaagtccatggtattaagcatcagtttgacagtgtattttgttggtaacagaaaaaggtactcttacatattgctattgggaatgcaaaatggtgtgcttcagagagaattttggcaatacaagcaaaattacacatatacaccttttggccccatagtcttatctctaggaatctatcttacagatatatactgagaaatatctgagaaatatgtgtgcacaaagctactgtggcactacttctaataacaaaagatgaaacaatttaaaatttgatctgaatttcaacaaaacaactatacaaattgagaccataggggaaatttgaacagtgaacaagtagttgatgacattaattattttacacatgataatactattatggttatgtttaaaaagagcaacattttagaaatgtttgatatgttaccattcattacagatactgtttgtattaatacttgaaatgattcaccttcagccagtgagagccccttgaagttaactcctaagtcctttgccacatcttttggagatcattatttatgtgtttatggatgaaattatatgattagaatttatttcaaaataatccaaaggacagggtatatggggaggcagagatgaaataagatttgccatgagttgataattattttaatctgagtgattagggttttgttatacttcttcgcatatgtttaaaacctcctgtgaaaaacgtatggagtttaagtaggcataaatgaaggcagtgcatttagaacaaaggcactgagaccaaggacaataggaaattggacatgaagttcttatacaatttaatttcctggtaaatgtaaaatagacttcctttatttgctctatatcttatttgtggtgtctttttgtgtgtatgtgatgtagtgcttaaggtatacttttctattagtataactctaaagattaaaataattcatgaagtatgcagtttatttgtttattggtgcccattatagggcctttgaattaccagaataattgatctggaggaagtgaatgttttctcacactttttatggggtgccatgttttcttttaacttttgcttgaacatagatttagatagatcaggtgaaagagaaaaattgttttagttatactatatgtgtatttattagagtataataatgaataaactttcctttaagatacttagtttctttatcagctttttaatttcatctccatttctcctagtctgtttttatttatccctgtgttctcctacctctctaaccctgtctcctttaccactctttacttttttttaaatatgctttttctttacttttcaaattgaacaaattgtatgtatttattgtatacaatgtgatgttttgaagtgcctatacattgtgaaatgattaaatctagcttacatctgcattacctgacatagttatttttgtggagagaacagtaaacatccagccttagcatctctcaagagtactgcagatcttcattagctatattcacatggagtaatgctattcaacctatttctcttatcaaaactaattttgtattctttgaccaatgttcctaaattcactctgcttctctatctcaatctttttccccttttctcatctttcctccttttttcagtttctaactttcactgtttctttgaatgttttttcttttcatctcttttcttttacattttgtgttttcccctctccttttcttacctctttctccatccttctttttctttgatttgtctgcccttttatacttctcatcttgctgtcatcttcatttctccttccctctctctccgcttcattctactcttctcctctttatttcttttctctctctgtgcctcagctcactctgtctctcctgctgtctagtctccactctctatttctaggtttgcccttgactttttttttttttgacctttcccttttcatctcccttcccaaacatttcttcctaattctatgtgctcttgtcttaggtttcttgctgttttatcagcacatgtcctagtttacctctttcttttttcttctttctctctttttttctttgtttttctgtatttcttccatgttgctcttctttttccacactgtcccttctctctctctctctctcataaacacacccctcttgttactctatatctcttcactcaatcttccatcttatttttcgtgaaagaaaattaagaatggaatttttctttttttttccagattttaacattgagattgttcatttagtaatttttaaacataattttaataacttacaaataagttatacagaatttcatatggttacaaaaatctatcttcctcaagtatttttgcttcagaatcctcattatgtcttagaaagacagataatgtggtttatttagtaatatctaatggtattaagcatgacaagcaggttaacttgttttctattctaccaacagattaatattaagattggaagtttgtgtcttttgctggatattggaaattgaatgtaatggcaacagaatttataaagagttgctgtggaggatgtttctatggtgaaacagaaaaacacaactgtgagttttattttgacttcagtaacatttatgtagcatcttcttcatttgtggcattttgtaatataaagaattaggcatgttttccaacttcttaggggaggcagaaacataaggcacactaagtaaatattccataacttcaagtagtctggagcataggggagagagagagtaattcaacccaggggattcgtaagatattaccataaagaaaattgcatttgctatggaaatctgaataggattttagcaagttgggtgggaagaaggaagagaaactgaaaattggacatgggcattacaggtggatgaaatagtacaggcaaagacagggagggaagagaagtatgtttgggagacaacatattctgaccaatgttttgatttaaataaagacaatctacaatatgtgtataacattaaaaatgccttgaatgaatgaatgaccaatggggaagagactcataactatgaagactcacatttattaaggacccctggagagttctttttctattgcatggctcccttatctcttctctggcacttttatttcctaatctacagcagagcttcatagtatatttgagtatgaagccttcttttttacattaaaacatttcataaatttctacagaatagtacttgtactttcagtctacagatagcattatatatatataaagaataacttacctcccatcttaaatcatgtagcttaggaatcacatatgattctaaagaatgaataaaatgggtcatagaagctacgactggggtagctgccagcaacaaaagaattgcttttgttgacagtagttttaaatgactagatttttacttgaaagcactatataactgactacaaaataaaattgttttccatctatgaattcttttgggaataagactctttaaagctgcttttaccattatgataagttaatgcactttaacagtagtgtattaattgctcaaatatcgtctggacaaaattaatgtagattccagaagtgtttggtaagacccaagagtagtttatgtgtcaggaatttcttctaaaatggttaaataaatatcaaagtatgctaggtttagattattatatgtaacctatattcatatttgtgactttttttttcttttatatgcagtttctgtggaaagagattttaaagcagcagtcccaaatagtcaaaatgctactatctctgtacctccattgacttctgtttctgtaaagcctcagcttggctgtactgaggattatttgctttccaaattaccatctgatggcaaagaagtaccatttgtggtgcccaagtttaagttatcttacattcaacccaggacacaagaaactccttcacatctggaagaacttgaaggtaaacaataaaatagcagtatttaaaaatcgatatgtagcatttaagtgctattattttacttttatatttttaatacaaaattcatataaaatttttttattttactttttatattttgctctttctgtagaagaacttaatgtacagtagttttgaaaggtcccattttgaaatctgatcataatacaataatttgtatgtagaattggccttttttcaagaaataatatgtaattggccctccatatctttgggttccacatctgtggatttaaccaactgcacctcaaaaatattcagaaaaaaaaaaagaatgattgcatctgtactgaacatgtgcagacttttttcttgtcattttttccctgaacaatacaatatgacaactatctcagtagcatttacattgcgttaggtattataagtaatcaagagatgatttaaagcatatgggaggatgtgcataggttatgtgcaaatactacaccatttatataagggacttgagcatccatggattttggtatccatagagggctggaaccaatcccccacatatactgagggataactgtaattagaatacctcagttatccgtcacatgtctagaatgaaaaagtaaaggagttagtaaatgtagaaaacatgtttcttatttattaatttctaatatttggttagtaatcacttttccttctcttctttcttctaccaggttgtacttcccagtctaaatagttacttgaatgaggtagatccattggcagaatttggctgatgtagaagccaaattattagagagaagatgaaacaacatgtagctcttgtcttgtttttttaaaaaacaatttgtattagtccattgaaacactgtaagtcacaatagcttttttaccctcaaaattttattagaaaaatttcaaacatacaggaaaataaaaaaaaaacttaatagtgaagacctgtatgtccaccacataaattctgccattaagattacttactatacttgctttagcaaatatctgtctacctatccattcttctatccattattaatccactttttggagaggaatgaatttcagagtaaattgaagacaccaatatatttccttgcaaacacttaaacatatatatcatttactgggttcaacgatctctttacagttttcttcttttggcataaattttacacacagtgagctgcccaagtgagtatttgtagaattttgtgtgtatttgttgaattttaagtgtatatttgttgaatattgacaaaagtatatgtcagtgtaatccaaatctctatcaagatctacaatatttgtccaaatattttttgtcttatcccctctcttttctgcttctgggattccgattatacctatgttgaaccttttgatattgttctatgggtctctgagacttttttttttcaagtatctttttttctctgttctttagattcaataatattgatctttttttcaagttcactgtctcgtctgttatctttagcctgctgttaagcctattcatgaattttttattttagacattgcattttttagttctagagtttacatttggttctttgttatagatttcctctactgcaatttcttatttttacagtattgcaaacctattttcttttatgtttttaagctttaaaatctttatctggtgatttcagcatcttgatcatctaggtttggattctgtggattgtcttttttcttgaaaatagatcacattttcctgtttctttgtatatggagtaatttggggttgtattcttgatatcaatatcaaaaatattgaatgttatgttgtggagactctagattcagttacattcttctgaaaaggttccttctttcctccctttctcccatcctcccttcctacttctcttctttcatccctcccttcctccttccctttctcctttccctcctgatatggtttggatgtttggccccgccaaattcatgtgattcccaatgttggaggtggggcctggtgggaggtgtttggatcatgggggcagatccctcatgtatggcttagcaccatctccttggtgataagtgagttctagctctgagttcctgtgagatctggttgtttaaaagagcctggcacctccactgcccatctcttgctcctgctgttgccgtgtgatgtgcctgttctctttttgccttctgccatgattgtaagcttcctgagtccctgattagaagcagatgctggcaccatgcttcctgtacacactacaaaacagcaagcaaatgaaactgcttttctttataaattacccatcctcagatattcctttatagtggcacaaacagactaacacaccttccttcccttccttcctttctttcttcctccctcctaccagacaagtaaactggttggacttaaactacagattttgtcttgggtggcagctcttgggtggtagttcagagatgagacagatatttgaaaaggctttatttacagaatttgggaatctctcctttccaggattcccaccttactttcctgcagctctgattttcttgaactgtaccctgtggttcttcaggctagaaagactgtgagttttctattggggttttatataccctgcgtgttgccaactttgatgtgtactcaggctaaaagtcattaaaaacagataactcactttgtgccattacctttttccccagaatcaactcctgtccagatctgtattacttttctttactcttcattgccttcagggtttttattttcttgctttgttttagttttggtctagagtttattgttacctacaagagagttgggtctggtaggagtgattttttaaattttaaattaaaatttgtttttttgagacagagtctcactctgttgcccaggctggagtgcagtggcatggttttggcttactgcagcctccatctcctgtgttcaaacaattctcatgcctcagcctcctgagtaactaggactacaggtgcacaccaccacacccagctagtttttgtatttatagagatggggtttcatcatgttggccaggctggtcttgaactcctattctcaagcattccacccaccttgggctcccaaattgctgggattacagacgtgagctaccatgcctggcccaattttaattttttagagaaaagaaaagatgaacctagtgcctggcctatcatcttactttgcgcatatcaatagtgtttctcaaaaatagttttaaaaagttctggcttacagaatacccaatcaattgatctttctctttttttttcatacttattaacaacattgggattaaaccatgcagccttgtaagttgtttcatccacataatatgttgtgaacatttcatatttgttgctttttgatgaatacatagtatttcttcatatggacatactgtaatttttttaatgaattttctattcttaaataattttgagtttttactctattattttcataatcagaaaaaaggtaagaaatatccacctggaaatatgtgatagtttttcttatgttcttgacattgtgctcactagaaaacattgctttttgagttgaatgaggaagaaattggttaactcctaaattataggttcactgaagaagtggtaaaaccatctgatttgtatatattaaagagaaaattacttttattagagtcaagaaagtaaggtggtacctaattaaagaagttaaatatgtgtatgtatgtatgcacgtgaatgatgggttgagaaaagagaagattttgagtgaatagagcagactgctatcaataatgactaaaattgtgttgcaagcacagtcaggaatcatttaacaatggcgatatgttctgagaaatgttgttgttaagctatcttataattgcatggacagtgtagaggcacttacacaaacctagatggtgtagcctactaaacacttaggctatatggataccatatttctcctaggctacaaacctatacaatatgttactatgctgtatactatactaaatacagtattcagtacagtaaaaatatggtataaaagttaaaagatgatacaccttgtattagtctgttctcacgctgctgatgaatacatacctgagactgggtaatttatgatgaaaaagaggtttaatggaatcacagttccatgtggctgggaaggcctgacaatcatggcagaaggtgaaaggcatgtcttacatggcagcaggtaagagacaatgagagccaagcaaaaggggaaaccccttataaaaccatcagatctgagacttattcactatcacaagaacagtatgggagaaactgcccctatgattcaattatctcctaccaggtgtctcccacaacatgtgggaattaggggagctacaattcaagatgagatttgggtggggacacagccaaaccataccattctgcccctggcccctcccaagtctcacatcctcacatttcaaaaccaattatgccttcccaacagtcccccaaagtcttaactcatttcagcatgaactcaaaagtccacaattcaaagtctcatctgagacaaagcaagtcccttccgcctatgagcctgcaaaatcaaaagttaattacttcctagatacaataggagtatagacattggataaatacacccattccaaatgggataaattggctgaaatgaaggggctaagggccccatgcaagtccacaatccagcagggcagtcaaatcttaaagctccagaatgataacctttgactccatgtctcgcatccaggtcatgctaatgcaagaggtgggttaccatggtcttgggcagctccacccctgtggctttgcaaggtacagcttccctcctagctgctttcacgggctggtgttgagtatctgtggcttttccaggtgcacaatgcaaactgttggtggatctaccattctggggtctggaggatggtggccttcttctcacagctctactaggcagtgccccagtggagactctgtgggggcttcaactccacatttcccttccatactgccctagcagaggttctccatgagggccccacctctgcagcaaacgtttgcctggacatccaggcatttccttacatcctctgaaatctaggaggaggttcccaaacctcaattcttgtgacttctatgcacctgcaggctcaaccatgtggaagctgccaagacttggggcttccaccctctgaagccatggcccaagctgtaccttggcccctttagccattgctagagcaactgggatgcagggcaccaagtccctaggctgcacacaacaggggggccctgggcctggcccatgaaaccactttttcctcctggacctctgggcctgtgatgggagggcttgctgcaaaggtctctgacatagcctgaagacattttcccattgtcttgatgattaacatttggctccttgtcacctatgcaaatttctgcaggtggcttgaatttctcctcagaaaatgtgttttttttttctattgcattgacagtctgcaaatttttcgaacttttatgctctcttttaaaactgaatgcttttaacagcagccaggtcacctcttgaatgctttgctgcttagaaatttcttccaccagataccctaaatcatctccctcaagttcaaagtttcggaaatctctacagcaggggcaaaatgacaccagtgtctttgctaaaacatagcaagagccacttttactgcagttcccaacaagttcctcatctctacctgagaccaccttggcctggatttcattgtctatgtcattatcagcattttggtcaaagccactcaacaagtctctaggcagttcctaactttcccacatcttcctgtcttcttctgagccctccaaactgttccaacctctgcctgttactcagttccaaagttgcttccacatttttgggtatctttacagcagcaccccactcctggtaccagtttactatattagtccattttcatgctgctgatgaagacatacctgagtttaggtaatttataaagaaaaagaggtttaatggactcacagttccacgtggctggggaggccttacaatcatggtggaaggagaaagacacatcttacatggtagcaggcaagagagaatgagagccaagcaaaaggggaaacccctttaaaaaaaccatcagatctcttgagacttattcactaccacaagtacagtctgggggaaactgtccccatgattcagttatctcccaccaggtctctcccacaacacatgagaattataggagctacaattaaagatgagatttggatggggacacagccaagccatatcacacctgtatagggcatttatcatgaatggagcttgcagggctgtaagttgttttgggtgagtcagtgagtgagtagtgagtgaatgtgaaaactaggacattactgtatactactgtggattttataaatgctgtacccttaggatatactaaatttattaaatatatttttgtttcttcaacaataaatcacccttagcttactgtaactttttactgtataaacttttttttttttgaaacggagtctcagtctgtcaccaagctggagtgcagtggcacgatcctggctcactgcaacctctgcctcccaggttcaagcgattctcctgcctcagcctcccaagtagctgggactacaggcgcgggccaccacacacagctaatttgtatttttagtagagactggatttcactatgttggccaggatggtcttgatctcttaacctcgtgatctgcccacctcgccctttcaaagtgctgggattacaggcgtaagccgccatgcctggcctaaacttttaaatattttaaaacttttgacttttttgtaataatacttggcttaaatataaacacagtgtgcagctatacaaaaatatttatatccttactctataagcttttttctattaaaaacttttttttttacttcttaaacttttttgttaaaaacttagacacaaacatccacattagcctaggcctacgtatcttgatgacaatcattgccatgtcactagaccataggaactttttggcttcattataatcttatggaaccactgtcgtatatgtggtccatagttgaccacaatgttgttatacagagaattacaataatttaaacctttgaagaatttagctttatgtctacatattattcccaacatgattattaaccttgaaaggaatttgacctatattttcttttttaaattatgaaatattatacacgtagaaaaatgcacaaaacagaaacatacagctcagtgatttattacaaagcagaatacccatgtaggtacagcctaggtaaagacatagagtagtactagtaaccccatagcttctctccatttttttgcctttcagtcaccctagagtgttcagtgtcaccattgttacaatcatgactctcttgcctttcttcttaccacctaagctcatatccctgaatattgtagtttaattttttctgttttctgaacttaatataaataatttattcagtctgtattcttttgtttatggttttctcattcaacattatgttttttagattaattcaagtaattgtcagtagttttagtttgtttttgtatctgtacagtaagtgtatattataattcgttctgtattctaaatggcatagtgtacagtagtgtttctgtgtagcatattataaggaatttgtatgtagtaagtatatactatatctattttactgttgatggaattttgagttttccaattttttggctattatgggtaataatacttacgaacattcttatacctatctcttggtgcacatgtacaagcacttcagttgtgtatatgttcagaatggcttgttgggtcatagaatataaatatcttcggctttagtagaaattgccaaactctttttccatagtgattatatcaatttacatttccactagcagagtatgatcgtttacattcctctactttcttgccaacacgtactattgtccgtctttttgcttttaaccattctggtgagtgtgtagtggtatttccttgggttttcaacttattttttcctcatgactaatgagattgattgtcttctgaagtgcctatcaatgtcttaagccaatttatgtatagtctcgtctgtctttttcttattgatttcttatgatttgtaggtgttcctcatgtattctggatatgagccctttatggccataccaccctgaatgctcctgatctcatctgatctcagaagctaagcagggtcgggcctggttagtacttggatgcatatgagccctttgtcagttatacttgttgcacatatcttctttcactctgtgggttaccttaaatagtctttgacaaatgggaattttaaattttaatgtagtttagtttattaaaatatgtctatgattaggctggtcgtggtggttcatgcctgtaatcccagcactttgggaggctgaggcggtggatcacttgaacccaggagttcaagaccagcctggccaacatggtgagtgaaaccccatctctactaaaaatacaaaaacttagctggcgtggtggcgtgtgcctgtaatcccagctacttcggaggctgaggcaggagaatagcttgaacccagaaggtggaggtttcagtgagccgagatcatgccactgcattccagcctgggcaacagagtgagaatcaacttcaaaaataataataaataaataaataaaattatatatatatatgtgtgtgtgtgtgtgtatgtatgtacgtgtgtgtgtgtgtgtgtgtgtatatatgtatgtatatgattaatgctctttatgttccatttaagaaatgcttccctgtcctaaggtcatgaaaactttcttatcagttaacctgaatatagaagctttattggtttgtctgtaatatttcatttagatctacaatccccatggaactaatttttttgtgaatatctttagttgaatgcaggcttattttttccctgttgatatccagttgtcttatcaccttttagtgaaaagatcattctttcttgtgcagtgccaccttaattataaagtaagtgttcatgaaacgggtgtctatttctaggccttcttttctttgctattgatctctttttctatcacttaccaatattatattcctaattcccagtagagcgaatctttcagtcttgtttttcttcttaaagattaagtttttggttattcttggtctttagtgtttccatataaatagtttttatttttatttttgctatttgatttccaacttaattgcattgtagtaagaaaacgtactttgtatgatttcagtccttccaaatttgagagtttctcggtgtatctcagcatgtggtcaattttaataaatgttctacgtcttcttgaaaaggatgtatctccccccccaatcttgtaatttaaaagatgttctatatataagtagaaaaataagaggaaactcagatcacacaatacagaattgtctatggggcaaagaaaaatgccagaaatataccagactgtcttaaatgcaggcttaatggctgatccttggcataatacttcacacagaactccctaaatatgtgctgatctttttagctatcaaagacatgtgatttagtattacttgagacaaaatattttttcttttaccctgggtgtaccagctgttggctaataactccaagaaaaggatgttataaacttttagaaacatttgctttcaggatctgccagagcatcttttggagatcgaaaggtagaactttccagttcatcccagcacggacctagctatgatgtgtataacccattctatatgtatcagcacatttcacctgatttgagtcgacgctttcctccccgttcagaagtgaagagactgtatggatcgggtatgaagatcttttgtgcttttcctctctgtgtttctctttaagaaatttagaaatcaaatgtaagatatgggaataaatgatttttactattaaaagcattttaaaaataagaaaacaagcttcataaatgtgataaacgttatgacatctctgtagtattatatctaatataagaattgaaagattaatgagttatatctgttggtagttctaaattccatttaatttcccttttttgaaagaagctttggttcaagagatcttttatacaacatggagactatagttaattatgatatattcttgaaaagtgctaagagagtggatattaggtgttctcaaaacactttttgttatcattcaaaagtgataactgtgaggtaatacatttgtaaattagctagatttaatcattctgcaatgtatatatactttaaagcattatgttgttcatgataaatacatataacaaaagagaaagaagttagctacataccaggtacaagggaaaaaacataaagaagaaagaagttttgttttcagattattttgtctttttgttgttgttgttgttttgagacagagtctcactttgttgcccaggccggagtgcagtggtgcaatctcagctcactgcagcatcaacctcccaggctcaagtgattctcacacctcagctccccatcacccctgccccaccgcagaagctggggctacagaagtgtgccaccacacctgactaatttttttgaatttttttgtagagatggggttttgccatgttgcccaggttaggctcaaaatcctgggctgaagcaatcctcctgccttggcctcccaaattgctgggattacaggcatgagccactacaccagcccagattattttgtatgcatttcacttgtcacctgtatattcataaactcttcaacagctatttgtacatagatatgttgtactaaatacagtaatatttttttcatttttttctgtattcagtgaaaatgatgaatttagaaactcatggtgtgatgggaaatataaacaaactgcttaagtgattatagagcttttgtagtttcatatttgagactgtgtgaattatagtctatcatgttcgtctgtgattcacaaaattctcagtttttcaggatatatatatatatatacacacacacatatatatgtatgtgtatatatgtatatatgtatacatatgtgtgtgtatatatatgtatatatgtatacatatgtgtgtgtatatatatgtatatatgtatacatatgtgtgtgtgtatatatatatatctctctcaaccagtgaatttagggtgaggtactgaaaataaagaagaaatgcttatttaagggcctgccttacgttcactactgtgctagaatatacaattggcatacaaagttcctttcttcacagatcttacagtgtaggagggaaactaaaaatacagactagaaatataggagcacatgggattgagtattgatttttaaaagtaatacatgcttattaataataaatagttgcactacacttaatacagagtgtttactcttagattatatttattggatcaaggaatggggaatgtaaagaaaaaagtaattttccctgtttgataattgatgtggatgtgaaaatgtgttgtttgatttgtgttgatttctgtttcaaacaaaaataaaataactgaaaaaaatttttttaagtttaaaaaatttttattagaaggctttatctcttctgtagatttgcacaaaatattcatgatgtattgctacagagatttagttcatggtaattaagtagaattccagtgtttcttaaaaatatatacttttctcatatccctttgtagtttgtgatttaaggacgaacaaacttcccggttcccctgggctaagcaaatctatgtttgatcttacaaactcatctcagcgattcatccaggtgaattatctacataaatttaattatatgtgataatttcctttcaaattaaaaattcagaaatgtatgaattacattaggaatatgctgtatattttttgtagatgtatctgttctgatatctgaagaataaataattgatatttcccatgtatattattttagaaagctgttatttgattgctaaaaggcagtagtttttcttttttcaataaattttatatctcagttggtatgctctcagggaaccttgaaacagttggtatttaaaatggtgtaattaaaagtgcttattaatttagcttttcttactgaatataaccagctagttttaaaaattatatttcttttgagatgtaggactttattcactgatgttaacactgcatcctcctggttttgaaaaggaattgagaattattttgatgttttaaaaaatgtttcttttttattacaagtaaactgtaattatttaaaattaggaaatagaagtaagcaaagtagaaagacaaattcccatatttcctataactcagagtaagtgcaatgtgaaaatattgttatgtgtactcatggtcttgtttccatgtgaatatatgtacatatattttttaaaatggaaatatattctagataatccttaatcctcaagtgagttaactttttatagatttaatttttttatagcagcagttgtttaacacacatcagaattgtttggagagcttgttaaaacacaggatgacaggcttcatcctcagagttcttaattcagtagctctgcagtagggcctgagtttgtattgctaccaagttccaaatgatactgtttctgcaggtccagattgactatgctttgataattgctgctttacaagtttttccatagcaggctatttctaaataaattctcattttcgttaatactctcaggtatgaaacttaagcagtaatatctttctccttattacaaaaccaaaccaaaacagcaaaggctttccagtatatcatcttgtaagatatttaagatattcctaacaaatgccaaaagctttttttttttttttccactacctgtaagtgggaaattctgacctgtaacactgtcaaaatagttagcatgcagtttgttactaggatggatattgaggcatatgtatcagaatccttaaggtttcatatgcaatttctgactaaagaataattttatttatagagacatgattcattgtccagtgtacccagtagttcttcttcaaggaaaaattctcaggggagtaacagaagcctgggtaaggaataaagtatcctacttttatactcttaagataattatttctactcagtagtaacttgaaagtgtatataaggtgaaaaactctagatgattgtatctactatgttgatataataaattaagtctaaataaaactatgttggtagtgttatcagcatatggatactcagatcacatggtccatttctcagtgttcaggtacaagtgtggctttttaaaaagtgatgaagcagttgaatatcttttgtttgtattaaagtgtactagtgaaggagcctccagaagaatacagtattaaggccatataaatgttatttggaaagatttctcttagttttaatttaaatccctcactgcaattaggttaagtttttaaaaccatgagacctttttatagtatatatcttccctctagtgcttcaataaatatattaaagtgtgatttttgtcttcttagattgtgaactttaaaaaataattgtagcattttaaaattgtgctcttaaaattggattgtgtcaaagcttaattgggttagaaggattgcatggcatttgaaacatctttgtccttttataattcagatacaattactctatcaggagatgaaagggactttgggagactgaatgtgaaattgttttataattcttcagtagaacagatctggatcacagttttacaggtaaattagtatagttaataccagcttttattacaaaattgaatatttagacattgtaaacactgactattgcccttttctggggaatgggccaatgccacctttgacatttggaattctttaatatttttacagaaaatagtatttaataaggcatctaagaaaaaaatctgtagtatgatggaagtatgtgtgtttttaagctcaagagggaaattgacataacatctagaatattatatgtcaaaatttgcttaatgtggatgcaacatgaggtctcagtagacaagtttattttttgcagtttttatctaaagtcagtacctcaagaaatacatcaaatgtttgtattgttggatcctttgtaaaattcaaactgtatttttaatttttttagtgcagagatttaagttggccctctagttatggagacactcctactgtttctataaaaggaatacttacattgcccaaaccagtgcatttcaaatcttcagccaaggaaggttccaacgtaagtggctgtttgtatttgaatttcttttctgttttttttttttttatatttgtcacttttacccatgtaaacaagtcagaataagaaagtcttttatcttagggaaactacaactatgtattattgctttttcaaggcaactttgagtctgaaaaatatttgatatttcattgtctagtattaagatgcatttaaaaagaatatcttattcactaaaatatatagaagattaacaatatctaagaaacctgtttacttttcttgtgtgaaaggaaataaatcttggcttctctttcccccaacccactttggctttgaaaaataaattcatgattgcaatgaatttcttttaaatatttccaattagtataacagaaagacttatgatcctgagtttggttttgtagatcctagattttacattaatttaaatacatcttcatttctgtcactttttataggttaaaagattattgtttttctatgcaaatgaaaagatatcttctaaaagacatcattttaaaataatatcattcaaatgactaataaacatataaaaagtttcttctcactattaatcatagaaatacaaatttaaattgcgtgtattgctttctgtttctttcttcctctttctttctttgctttcttcttagaattaggaaaacttttacaggtattctagaacatacaacttcttagaaattatcttgacactacatgtcaaaaccttaaaatatttatacttttaaacagtaattctactttgaaactggaaattatttctgtggaaataatctaaaatacaaaaatatataaaatactcttggaagttttgtttgaagaaaaattgaaaaaacttcaaatgtgtcatacagaggaatggttgaaaaacctaatggtgtacctatgtgtattagtttcctagggctaccataacagtactgtaccacaaactgggtgacttacagcaacagaattttctctcttgcagctttggagaaagtccaaaattaaaatgtcagcagtgttgattccttctctgagggagaatctgttctatgcctctcttccagctactgtgatggccagcaatccttgacattccctggcttgtagatcactccagtctctgcttctgtcttcacatggcattatacctgtgttctgtgtattcacatggccatcttcttaaaggataccagtcattaggggtccaccctatgtcagtattaccttttcttaacttcactgatcacatctacagtgaccctgtttccaaatgagttcacattctgagatgctggggctcaggacttcaacatatcttttttaggggggtgtaattcatcccataacaccatgtgatagaaaactaggtaactatgaaaactaatgtttaggaagagtttttaaggagctggaaaaacatttttaataaatgaaaaagacaatgatcaaaattgggttgtgtgtgtatgtgtatatgtgtatgaatgtgtatatatgtatgtatgtgtatatgtatatatgtatatatatattgggatcttactttatgaaaatatgtatcattgaaagtctagctagaaataaaccttaactcattataaccttgacactcatagatgaatactttctgaattaaacaattttactttttgattttcaaataaagctaatttaacttaggaaaagttaggaaaaatgttcccatattaaaacttgtatggaatctttcattttacaattttattattatatataaatttgtttgggagactcctatttggcaaaatacagaaagtgtgaaatgaagcatcacacttgcataatttgtaagctcattaaacattttgtgtgtaatatataattggtgtgattctatgacttgagactctaaaagaaaaagatagctcagtagttgtgagaccctcagaaagacagttctggctgtacagacagacataagctattacaacaagagtaacagtttgggcacagtataggcatacttcggagatactgtaggttcagttccagactgccacactaaaatgaacattgcaataaagcaggtcacatgagttttttggtttcccagtgcatacaaaagttatctttatactgtagtccattaagtgtgcaatagcattatgtctaaaaaaagtaatttacatactttaatttaaaatactttatttctaaaaaatgttaatgatcatctgagtcttcagcaagttgtaatttttttgctgttggaaggttttgccttgatgttgatggttgctgaatgatcagggtggtggttagtgaaggttgaagtggctgtggcaatttcttaaaataagacaacagtgaagttggccacatctattgactcttcctttcacaaaaaagttccctgtagtatgtgatgctgtttgatagcattttatccacagtagaacttctttcaaaattggattccatcctctcaaaccctgctgttgcttttcagctaagtttatgtaatattctgaatcctctgaattcatttcaacaacgttcacagcatcttcaccaggagtagattccatctccagaaactactttctttgctcatgtgtgagaatcaactccttatctgttcatattgtatcatgagatggcagccattcaattgcatcttcaggatccacttctaattctagttctcttgctgtttccaccacatctgcaattacttcctctgccgaaattttgaatccctcaaagtcagccatgaggattagaataaacttcttccagattcctgctaatgtcctttttttgacctttcatgcatcatgaattttcttaatggcatctaaaatcctgaatcctttctaaaaagttttcaattgcttttgcccaggtccatcagaggaatcactatctatggcagtgatagccttacaaaatttagtttttaagtaataacacttgaaagttgaaattactccctgatccatgggatgcagaatggatgtgtttgcagacatgaaaataacattcatctctgtatacatctctgtcagggctcttgggtgacgaagtgcattgtcaatgagaaataatgttttgaaaggaatctttttttttttgagcagtagatctcaatagtagacttaaaatatttagtaaaccatgctgtaaacagatatgctgttatccaggctttgttgttccctttatagagcacaggcatagttaatttagtataatacttaagggccctaggattttcaaaacggtaagtgagtgttggcttcaactcagagtgactgattgcattagcccctaacaagagagtcagcctagtcctttgaagccttgaagtcaggcattgacttctcctccataactgtgaaagtcctacatggcatcttcttccaacagaaggctcttttgtctacattgaaaatctgttgttgaatgtagccaccttcttaactagatcttctggataacttgctgcaacttctacattagcacttgctgcttcaccttgcacttttatgttttggagactgtttctttccttaaacctcgtgaaccagcctctactagcttttagtttttcttcttcagcttcttcacttctctcaggcttcatagaattgaagagagttaggaccttgctctggattaggttttggcttaagggaatgttgtggctgatttgattttctctccagacaaataaaactctctccacatcagcaataaggctgtttcactttcttatttgtatattcactggagtagcatgtttaatttccttcaataatttttcctttgcattcacaacttgactaagtggtataaaaggcctagcttttggtctgtctcggctttcagcatagcttcctcactaagcttagtcatttctagcttttgatttaaagtcggagatgtacgtttgttcctttcccttgaacacttagagggcattttagggttattaattggcctaatttcaatattgttgtgtcttaggaaacagggaggcctgaggagagggagagagatggaacagctggttgccagagccgtcagaacacacatatttatcgattaagttgcccatcttatataggtgtggttcgtggcactccaaaacaattacaatagtaatatcaaagatcactgatcacaggtcaccgtaacagatataataataatgaaaaagtttgaactattatgagaattaccaaaatgtgacagagacatgaagtgagcacatgctggtggaaaaacgacactgatagacttattcaacacagtgttgccacgaaccttcaatttttaaaaaatgtaatgtctatgaagcacattaaagcaaagtacagtaaaatgaggtatgcctgtattcaaaatatttatgctagttgcccagatatcttgccttttcaaaaggaataaaagctcctttctaaatggatgcattaaagatggaaagaaggaagtgtatggcaaagaaccgtctagtgtcaagaatatgttagcccatagtaagccaacgatttaaaaatattaaaagtaacaagagcatttaaaaatgttctgaggctagaaaacagtgacttgctgactgagatgggtgcttaggagagaagatataattttaaattcatattttcctttgtcttctctatcaaggagttagattttcagatcggaaagggtggaataaatgtcaccaaaagagaaattgaagcctgagatagatgggaagattctttagacaaaaaataactcctttaaagaaacaattcaagtctctttatgtgaacaagttagatactatgaacaagagagtgcttgcatatgagattcttgcaccactctcctgaactgttgaagaatggtattgataacaggaaagatgccagaaccaaagatggaaaaacaattaattttcaaaaagggaaaaagctgtattgtggtgagcatggtgttaatatgacctgaattcctaaataatttaaaggatgatttgtgaaattaagaaaggtagaacccaggataaactctagaaaaacaagtcattgccattcttattttcattcacattaaaaagatgttttgttgtaaaaagaattgaatatacctttcctaaatataaaataaaatattattttgtattggcatataagccttttatttatatattttatgttttcttgttttttttttaaggctattgaatttatggaaacgtttgtatttgctattaaacttcaaaatctacaaactgtaagacttgtatttaagattcaaacccagactcccaggaagaaaaccattggagaatgctcaatgtcactcagaacccttagcacacaggaaatggattactctttggatataacaccaccttcaaaaatttctgtaagcgataatagtatgttaagagtatttcatacttttagaattagttggtggatgggcttttgtttgttagagaatagcctgaatagaatattagaggatctggaaggctctcaagtagcaataatattattttcaaatatttagaaattattgataaaatgttaacagaactgttttctttctccattggaaaataacctcagggttaccttctcctagcacatttcttttttctttttttctttgagatggagtctcgctctgtcgcccaggctggagtgcagtggtgcgatctcggctcactgcaagctccgcctcctgggttcacgccattctcccgcctgagcctcccgagtagctgggactacaggcgcccaccaccatgcctggctaatttttttttgtatttttagtagagacggggtttcactgtgttagccaggatggtctcgatctcctgacctcgtgatctgcccgcctcggtctcccaaagtgctgggattacaggcgtgagccactgcgcctggcctctcctggcacatttcttattaatgttttatacttcaagggaaataactctgaagtatgaataacctttttttttttaagtttttttaggtagctgataacttaggaaaaacaagaaagaatcataaattccacactcaatcagagattgccctgaaatagattaggaaagttgttttaaccatgagtaagctatacagcagctcataaattgattagaagtttttacagctgattttttttttctgtaaaaagctttattacctaatggtgctgattgggacttgctatttgcttctcagccaactgaacactgtttttaaattgtttaggaatttctaattaaattgtatagattgaatgttaggataatgtttataaaaatcagtcttaagcttttgtaaggtcaaacctatatgcggttttaaatttgtatgggatttatattttacctgtttccaaaaatatttaaggtgactggaagtgcttcttaactctgggtatacattagaatcatctgggagctttaaaaaaatgcccatacataaactaaaaaaaattagaattttgggggatatggggcagaaacatgtatctacccttcccttcccttccctcccctcccctcttctcccctcccctcccctcccctcccctcctttcccttcccttcccttcccctcccttcccttccccttttttttgaggaagacagaaagctctgtagcccagcatggagtatggtacgcaatcacagctcactacctcctccatctccccgaccaagcaatcctcccatgtcagcctcctgagtagctaggactacaggcacaccaccatgcccagctaattttttaaatttttagtagagataaggggtcttgctatattgccctttctggtatcaaactcctcagttcaaacagtcctcctgcctcggcctcccaaatttgctgggattgcaggcatgagccactgcgcccagccttgcctattattctttatctcaacccccaatgtgctgttctgtaactatgacaggagtttgtcactggcatttttgacactagcttagtaggtagtaatctgcagccatagtttacagaaggcacaaatagactattcaaatagataattcatatattaaaactttaaaaacagagtatataagaagagaactcagggattttctggggaattaagatattattatctgcgttggaaaatatgaatgaataattatggctaaatttctactaaatcatatttcatgtatcagagattttataaatatttgtgtattttctgaatgccaggtgctagggttatagattgataacctgaaagaagagtgtttgggctatgctggaccagtgagtttatgttaataagtgtgaatgtttcatattattggctaaagcaataatagtatgctttgttttaatgtgttgaagaggaaaataaatattctaatagtgatgtctaaagagccgtactttcccatccacactgacaactgtttcaccatgaacagcacaactttcgggtttttactcaataaagagtccttgaccttgacaaatagtaatgtaaataattacttcacatctcaaatttcggtattgaataatgtggaagaaatacgttttcctgaagaaatagctagcatttacagagatttatcttacggctgcctcaatgctacgtgatctaatgatctaattatcaccgtgttgttctttatccgttttgtggagatcaggggaacacttgcctgaggttatacagccagtagttggggagtcaggatttgaatggaggcagtctgattccaaacccagctcttttaactctaccatgtattgccccgctaagaagatattctcaaacatcaccagatcgtgatgttctctaatgatgctcagcatttcatttcaacccttccaggaaggctaacaatgttttcttttctgaataaaaggatacattattcaggagcagttttgtgcttattaaatgcaggcaatacataactgctaattgattggaattttaattttttggttattatgagatttaaatagtttaaatctttgaatagtttttcatgatctgaattaatgtcctggaacatgaattgaatttgtgaaataaccttggcaagtaggaaatggtaagcctattgccaaatgctgctctgttttttttttttgttttttgtttttgagatggagtctctctctgtcgcccaggctggagtgcagtggtgcaatctcggctcactgcaagctccgcctcctgggttcactccattctcctgcctcagcctcctaagtagctgggactacaggtatcagccaccacgggtggctaattttttctttttcttcttctttttttttttttagtagagacagggtttcaccgtgttagccagggtggtctcgatctgacctcgtgatccgcctgcctcggcctcccaaagtgctgggattacatgcgtgagccaccgcacctggccaatagtttaactctttgaacagtttttcatgatctgaattaatgtcctggaacatgaattgaatttgtgaaataaccttggcaagtgggaaatggtaagcctattgccaaatgctgctctgttttatgagagtgaactctacaattgtgtaacaataagagacgttttgccacctttacgtgttttcataagtgttattacattgtgggtacaaaactgtaataaaaaataataaaaaaatttaaccatgatttcccttgtgttttataaacagtatgactctatcttttaaaatatattttttaaatgccaaggacagcaattttttttcaatcagcaaaggttttttttttatggctaccaaattagttcatgtgaaaagttgttagttcattctcattctgattacagtcaaaagcaataaattaacttatttattagaagtcagcatttgttgccaaataacaagttttatcatcaatttagaccttttcaaggggaaattaaattccaacagttgagtttgtacttgttaagcaattcacttttccttttctatctcttcatttcttatggcatgactggtttgaaatacagaatcatattttaagaaaacaccaagcttctgtcaatgttatgtatatggagaggttggagtttttgttgtttttttgttgttgttgtttttcccaatgagctatgagccagttattggggaatactgagcaatgtcaaatataaatgtcttcatcaagtgtcattcagttgttctgtaactttattggaatcagtactaacaaagactttgtgtctgtctatgctgagccctagtatgatctgtgaacattatgttcctactttattcctattcttactcttttcaacatgtaaacaatagtgtttttgtgtttggacaaccattctcccttttatttttcagtccaaggaccttggaatccacctaagtagtctggcttgtgttgtatttcacagacaaataaccaactttcttctgctgttggtcagcagtactgaagaacacattttaatttttcctcttctctaagtctccttcattttgccgtttgcctcaggttttctttgaccttttccttattatttactgcctcatcactttgactagcttccttcttgccagctttctttagcttgcttccattcagcatagtaattcactcttaatccacagatctgtttattgctgtcttctgattgtggtagcacctactctgatctccataattagaaaataatgatgattttcatatgtaactttttaatcatatttcgtgtgttctctaaaaataatttgactacatttagttgttttgaaagtgtattccttttgtgttaatttcactggcattttcttcagtgatactgcttattaatttaatttgcttttaatttgaattggctctaggtgtcacagattttgaagtttcagtacatagatataacctgtattttcagaaaccatgcaaatgagtactttaaagaattcatgatatttatcttcataactttgtcttgtaacttatagttttgaatatcatttgaaaggaatactttcaaaatttctaaccttagctttttatcttttaatttttgaattgtttcaaaaactttattcttaactaccaaatgacacttttttgatatgcaggtttgccatgcagaacttgaattggggacttgttttcaagcagtaaatagcagaattcagttacaaattcttgaggcacggtaccttccaagctcatcaacacctctgactttgagtaagtatatcagtggttcaaagtagaatcttcagaaagtattagtaatagaaagtattttttttacatttcttacaatggagattaaaatcttagtaacttttattatttaacttatttactttaaatttaaaattataagatttcaaattttagccattgtgtctaccttaatacagtggtctcttgagtgttatccagttatgacctctctgcctttgatactgttttttatttagctcatcagttcatacaggttgaatgtctagaggattttcagttatattttaccacctgaaatgatttatcctctctctaggtctgtgccctttgtggaatgccctgctaactagaaacttaattgtaaaaaatatatatatcaaaaacaaacctagaaacacttttctctccctgtgttttgtctacaaccaggagttgtgatactttggttgtctagtcccagagatttgagtgggcagaagtgccccttttccctactaaaagaagggaactgtatgggggcaggcaaaagcaatgcatgttcaccgtaactagaaagactaaaaataaatgaaactgagcattcaattcaagaagctagaaaaacaacaaacccaaagaaattagagtaaggtattaaagctaaagttgaaggtgacagatatggagacaaccacaaaaggcataatcaataaaactaaaagctgcttctttgaaagaatcattaaaatagacacatctatagaaggtgagatcaagtgaaaaaatagagaaaacatgaatgatattctgagcaatgaagaggatataatttcaaattcagaagagattctatcatgtataaagcaataccatatatagctataccgatttatttgggtatctatgtaaaataaatgactttctgagaaattcagcagttgaaagtagaatcttaagaagaggaagaaaatccgaataaaagaataagcatgaaaaggtagttaaagaactgcctctaataaaagcactagaccaaggtaattgtactgggagattctaccaaattttcaaggaacatgtaatttctgttgtatataagctgttccaaagcatgaaaagaagatggaaaaagtaattttgtgaggtcagcatattcttgatactaaaacagaatggatagcacacacaaaaagtaattatagactaatgtcacctgtgtagatagatggagaatcctaaaagaaaaatgagcaaataaaacctaacttggaataaatcatcagaactatatataattaattctaggaaacaaggacaacagatgctgtttatgacgggcttcccttaaaacagcttatcaggatgaccacaactcttcattctatcaatctgacggtcggatctcagccctcactgtggctcccacctttctgggagttctcactttcttgcttccctggcaccccagctctgtcacctccaattagtcagactgtactttctgcttgagctgtaggcactgtgtgtcagtcagataggggagtatgcttaggtgaaaagctatatcaacctgaattttacccagtgaagttcccgtcttttaccagttgacttccctccagtttctttctgcttttagtgttttaaaatttttttccaaagtttataatagttgtttatgggaaggttagtttatacaagctattctgccattactggaagctctatacatctcaaatttaaagtacagattttatctagtgggcatatacttaactcctggagtcttttatattttacctatataattgtgaaataaatacctccagctgtccaaaagattggtacctctctttagtgtgatccttttcagtgtgcactcttttactgtgattgttgtttatgcctccatttccagtctttaatggcattcagccacagaaagattaagttcatttaaagttacagtagtaaagtatggccaaagttataaagttgattagaactgttttctgttatggtcgtagctcatcaaacatttaaaagtgacttatctatattttttacaataaatgttatatatatatattccaacttggatgtgtatatacacatctttatatggtattttgaataacattttataaaccaatatttctaattttttaggttttttcgtgaaggtgggaatgtttagctcgggagagttgatttataagaaaaagacacgcttactgaaggcctccaatggaagagtcaagtggggagagactatgatttttccacttatacagagtgaaaaagaaattgtttttctcattaagctttacagtcgaagctctgtaagaagaaaacactttgtgggccaggttagtaggagtttttatccttccttatatttttctatgcatttaaacagtcagttaacaaagggaatacaggataatattaaagtcaaatagagtacagttcttcagcatcataaatcaaaattcaattgctacaaaaatcgaaacttgtcagactttttgctttaatacaaatagttggaatttctgagcaatcaggtttatctttaaatatgtttttttctgagcttttttacttcaaaaacgatgagaattatcaatttttcagtactactgacttgttccttgtggaaggagggaacattaagtatttaaatcaatttcttaagtcttcgagtatcaaatttattttgtttaatctttgatttaatgtttaacatgggcactttttatattctcttacctgagttagttttgaattcctagaacatgtccattttaacagtggttgtgatattatttagttaatactactgtctggattattttaaaatcttggtacaatttgtataaaacaacataacacttgttaacttgccagtcctctaggaacttgtttcctttccttactctgaatagactagtggtagctgtccattatcttttaccttaattacgattgtttgaaccacatttaaattccaaaatctatattattggtttaaaagcttcaacttgacaagatattattaacagtctacatgaaatcctcaaattatatatgaattttcaaacattgatatcagctccttgatttactttttaatatatatttttacgtaaaatactaattaaaatgttgttttatcatttattatttggaaaagagcttgaatttaagaattcatataaccagcataattttgaagaccattaagcctttatgaagtcaattcagttaaagttttcgtatatcatcgagcctcaacttaacggtatgaatggaataggaaatttacttgagatgattttcatgataacatttgtggtgattccattctcttggctaagattctagttagaataataattctggaaaggttcttgctggtcatctgctccgtatggcttatctggtatagccttaggaggaactatgatggggtagccaaaggggaactcaaggtcttccacccctgtatcaacgaaagtactctaatgtctgttttacatactgggattatttgtaagatttcatttgaaaggaaggttctttagaccaagaaagaaaaggaaaaaggttgaaaccaatgacctgctccaatctcttagaaactgaatctcagagaagttaacttcaaggtaaaagcatttgttagtgctagaggtaagatgaaaattcaagtttttttattccttgtcttcataataatataattattgtgatgtcttttgtacaatttgcataatactatgtatacattcacatgtagtatttaagttacataagtgatgggtactatgaaattactattgatcaagaatgactattagattttaattaagattacactttatttcttgtaaaaggtgatttaaaatgcacattccttaccaatctaatttgaatcatgattagcctcagtttaattatccttacaaaaatatttttgagtggttgggatcagttttaagttgagctcctagatttgttgaataggaaaggatactaataactgttctaggggaaatgattttgtaatatttcaccttgaatttttgaactgaaccttataaactagtcttcagaatgactaagcaggttaaatgttttagcatttaaatgtcaaatagagaaatcaatctgacttttggaaaaaagaaagatgtttaatttaaaatatgtaaagcaaacttccaaatttcttccatcagtaagagtaactaactgtctgaatgtagttattattattgtgtcaagttaaatgattgtacatactttcctttacagatttggataagtgaagacagtaataacattgaagcagtgaaccagtggaaagagacagtaataaatccagaaaaggttgttatcaggtggcacaaattaaatccatcttgaagacttcacacattaatttggtgaagaacttgacattcttttagaagacttatgatttcaatttgctaccaatgagaagaggcaaatcaacaaatttgtcaatttatgggggctataattatggtatataatgtatctgatagaaaatttgataagaaaatgtaatgaattttatcagatatccaaagtaaaggaaatgttttaaaactgcaacaagagacacagacagtaaaatcaaagtattattaggatgactaaataaattataaagtctgtgagaatatcaaccatagatagttctttctatattatgttttcgcttttgtattttaagctttacttagatattcaaaacctggtatatcaagtctctgttagtactattggcatttagaagactttaccattatttcagtgctaggcattattgattaggtcttggctccactgtttacctcttgctatgtattttctcccggtaaaaatgaattgaaccatttcaactattttctatatttggagaaagtttgtgccctgtgttttataatttttttacccataagacatcacattatccctttgtaagctacttatctccaaaaaacttcagaaatagaaaactacattttggcaggaataattgaaaacaccagaaggttgaagtttaattggaaacccagaatatacatactttgctgttttcttccctcaaatattttactatttgttttatttggagttaaaataagagtatcatccatatggtccatcctaattcacagaattaaatgagcttaaatagaaaattcagtattttatgataatcacttcgtttttagtttttaaaatttagattattctataatttaccgtgtttgagtattttctcatttttttcataaccatacctgattatactgtgtaacaaatattttctattgcagttttctttccagtacttattagaactcagtatttggaaataatttcagcttaattgaccataagaactgtggccaaaaagaacagttttttggagaggcagatgacattatacctgattttagaaaatctcactttatttttgctaataagtagactaagtgctctgtgttctcagtcttccctttttttctgcccccattcttactttgtcccaggcatgcagagaaagatggtgatattttaggccaggagtataccttgctataacctaagcatgccttctttattccagctcctatgttctgtgtatatcattaacattttcccaaataaacacttaattctcttttccctaggtgccatctcctcaagctacaaaatgtccacatcttatatcccctttgcttctactgctctgattttgtggtaccagtactctctgccactgaacattttgaaatatttttgttttagatttgcaaaaaatgacatataggtcagtactcacatggatttttaagataaatcacctgtgtgataatattttgaatctgagacgaatacaacttttaaaaattgtttttaaaaatagacttttttttttagagcagttgtaggttaacagaaaaattgagaggaagatagagatttcctttctcccctgacaaagccctcaacagcctcccaggctatcagtatcctgcaccacaatggtacatttgttacaatcaatgaacctactctgaaacatcattatcatccaaagttcatggtttacattagagtcccctcttggtgttatacatgctagaggacaaatatatgatgatatgtatgcatcattataatatagtatagtttcgctgccctaaacatcctctgcaaatgcaactattttaatgggtaccaaagaagtaaatgtatttactggcttttagataataaataacgggctttattgtttattttaaaagctacaatttgttttagctggtttctctgttctattaatgctttgaatttccaaatttaatatatgtagtcatgcatttaacttaatatttaattatttgatttatttaattttctatattcttacaatgtatgtatgatgtataatttaagggaaagctatgacttctcagtttcttagaatcctaggtaaataaaacaataaaaagaaaacccttacatttaaaagagctttcaggtacagaagtattgatacaactaagatcctaaatgttttaattagtgtttacttaagcctttttcaggtgaggaggtactaatgctggttatttccttgaagctttatgtggacctataaataaaaatccaatctcctgctaataggtatgcatattgtgagaaaaacgttaggagctggtagtaaaaaatgagattctatgccaaaataacttctcttcatatttgcctaggcatttcttgacctttacccacttacgcaaggagaaggaaatcataatgatgtcatgtgatcaaaggaaaccatggaagggttcacgctgatagctgatagcttttacagtgctcattcctaacagtggatttacttgtaagctttcagatcaacacaaatagctgcagcctgggttaaaatataacatcactatttggcttttgttttgcatgatttttaaaagcagtactcctagggaaatggcctctgaagtatatcagtttcatctcttaccaagactgttaagaagaaactagtgggattttgaacaagttatataattgtggtctgaaaagaccctaaactgaagttctgtttaaatatagttacatgaatttctctgatactaatgtactcaacagccaggtataaactatatctcctagtaacattttccatttttgtttaatcaaatacttgcttatgaaggatttcagaaatttgtaataaatgtcagcttttgatagcatagcagtaattgacatttcaaaaatatatatttctttctgtgtttggttgggtgtaatgaggaaaatacctgataaaatgtctgaagacactttctaatgttatcttggtgcataagctgtaatttttattcaaaattaaatttcaaatgtttgcagttttggctaaaacattgagttgaaagaattatgaaaagtgggcccatatgaagtaccatgttcattttgaaatatagatttaagatttagaaatatattaaaagagttaatggagcctcctaaattggattttattttgtgggtgaagaattgtaggaagatgaatgtggcctacagttttagtaatctcctagtggagttttttttaacttagtacttttttagttttaagttttttaatctataaaaaatgtgatttctataaaccatgattacaataaataattatattaaa

SEQ ID NO: 778 - DNA, 35747 bp, Homo sapiens
aggacacctttagcctcatttcctgatcgaacagcctcacttgtgttgctgtcagtgccagtagggcaggcaggaatgcagcagagaggactcgccatcgtggccttggctgtctgtgcggccctacatgcctcagaaggtgagtgggggcactggacacttaggccttcactggaaaggggggtatctcccaaatctgtgctggaaggattgaggtggggcaagaatatctatctcttcaagcaggaatttccaattgatttctgattacctacaagagaatgacatagctttaaattctagatctcccagaagtttcaggaaggaacctcattctaacaggcatactacaaatttttgccacctggaggatgaggtccttccatgtaggtacaacttcgagctatgtttccttttctgaagacagtatcttagaaaatccccagctagaggctggagtaaagcccctactattcatctgtcttcctccacaccccaacctgctaaacggtctgaacacaactgtgcacattcctggagggaaatacagacttggccagctgcgttcaaattaggtaagttgtaaatttcctgagcaaagtcagctctatggatacagaaaactgaaacttcagtctgacctttaaaaagggagggcagagctgagcacagtggtgcatgcctgtattcccacctacttgggaggctacggctggaggatagcttcaggccaggaattcaagattgcagtgagctatgatcacactgtgaattgccactgcactctgaattgccactgcactccagcttgggcaacatagtaaaaccccatctgttaaaaacaaaaagaggggaggggaggggaaagagaaggaaaggaagaaaggaaaggaaagaaagaaaaagaagaaaagcaggatgagggagattgaaccatacaaattatgtcaaagagaatttaaatcgtgagttgctagcatgtatttggagattgtaactgcatttgaactagagggaatctcttctaaagtagcactcactactatattcaggaaaccctaagtgtcagtacttaatacttgaccaatgactcttttccattgtcatcttttctttaagctttatcctgaacagattctctaagtctagagcagaggtggaatataagtctttggtctgctttttaaaaatctgagccaacattttaaaactgaaagctttctcatgtacatactcatacatacacacatacaaattggattttaaagcttctcttgagaaatcagatgtggcaacaatgattccaccataccatggcaagaactggctaaagcagatgagcctctgaagtttgctgtattaactgcctggtccctgcaggcatttgcttagggactcccaatatagtccgtcaatgtactgggcttatacaaataagcaacagaaaaaacctggacaatctcttctcaatttctactaatctatctatcttatcaatataaagacaaaaatttgtcactttatgtttctgtaacatttctcagaaaaattcaccattgagatttggggactcattttcactatttctgaaaggcctacctgctaaggcttcactcctagttctggtaattccaccaactcaaattttttacataaaactttgaaatgtgtacctccatccagcttcctgacctactcccacctgtccccacagcggcagctctcctacaggaaaggagggagggaacagcaggtcgaggaggcagagggtaatgaggaaggctctgccatacccaggacccaccttcacatgggactgagtcctggtagagacggtggggtggaacggcaaaatgcagaggtgtgtgaaaaggtacggctgctggtgataataaggaagggagccgagagacccagcaatagccttttgggttagtctcgatgctttacctaaggcagtttaggccacaggaaaatcacattgcctgagaagctccaaacttctgtcatttaaaaataagtgatactgggtaaaaatacacaagtaggcctgagaacagtcgtggaatagaggggcaacgccacagctattcttaacaaacttccactcaagtgtccatgtaagccaggtgccctgtgggaggcacttaagtgattctggctccagggagggggtggaaaaccaagtggggagggaggaaggtagagaacactcaacaactcaacagtgcagagaagaggacaggtggccttggcaaggggaataggaaaaaggcctgtgccagtttggaactttgggaaatatattttgtttccttgaggcagaaagctgttcccttatcttaatggtgtcttaaatggctatcttgttgtgatggctcaataactggcattccctaagtgttttgcataaatcaggaagcaggtgactttatctataattaaaagccttggattctgcccaaaggtagggcacactccacctctgctgacgtggctgctggctcccagaactcaatactgaatccataaacatgtctatcatcctgtttcggtggccctgagcctgattatttaaacccacaatctaggactttgtgggcctggctgttttattgtacattaagattaaggctcacttgtgcccagcagattcaagttaggaggttttgctgcagtgagtcccaaattgccttcccactgacaaccttctttctcagagtacaatggctactgaatcacaccaatacttgctagagatttgctgcttgcatcctaaaacgtttaccttttgttttaatcataagactctggctagggaaggttaccacgaatatacatttgtgactcaatgttgttctgcacaattgggactccaattgtggtccctaagaggtctgacataggtgggactacaggtgcatgccaccacacctagctaattttttgtttgtttgtttttggagatggagtttgttgctcttgtcgcccaggctggagtgcaatggtgcaatctcggctcactgcaacctccgcctcctgggttcaagcaattctcctgcctcagcctcctgagtagctgggattagaagcgtgcaccaccacacccagctaatttttgtatttttagtagagacggggtttcaccatgttggccaggctggtctcaaactcctgacctcaggtgatacacccacctcggcctcacaaagtgctgagattacaggtgtgagccaccatgcccaggcacacctggctaattaaaaaaatttttcttgtagagatagagtctcactatgttgcccagactggtcttgaactcctggcctcaagcaagtctcctgccttggcctcgctgcctgtaatcccagcaattgggagaatgaggcagaaagattgcttgagcccaggagttcgaggctgcagtgagccatgatcgcaccactgcacttcagcctgggtgaaagagtgagactctcatttcaaaaaaaaaaaaaagtaaaaaattaccaaaaaaataaaattaccaaaaatgtcacaaaaattaaagaatttatcctaatattatgaaagttacaaatacttagtgtattttcaaatataaaaatttaaagaattaaaaaaaggaaagtccctcttcatcattcctttaatccctctcccctctccagagggttctgcatatccttccagaatttcctctatgcatttagcaatgtgaacccacacatacatccacaccaatttttttttattatacttaaaggtctagggtacatgtgcacaatgtgcaggtttgttacatatgtatacatgtgccatgtaggtgtgctgcacccattaactcatcatttacaataagtatatctcctaacgctatccctccccgctccccccaccttacgacaggccctggtgtgtgatgttccccaccctgggtccaagtgttctcactgttcaattcccacctatgaatgagaacatgcggtgtttggttttctgtccttgcaatagtttgctcagaatgatggtttccagcatcatccatgtccctacaaaggacatgaactcatccttttttatggctgcctagtattccatggtgtatatgtgccacattttcttaatccagtctatcattgatggacatgtgggttggttccaagtctttgctattgtgaatagtgctgcaataaacatacatgtgcatgtgtctttatagcagcatgatttataatcctttgggtaaatgcccagtaatgggatggctggtcaaatagtatttctagttctagatccttgagaaatcaccacactgtcttccacaattgttgaactagtttagagtcccactaacagtgtaaaagtgttcctatttctccacatcctctccagcacctgttgtttcctgacttttgaatgattgccattctaactggtgtgagatggtatctcattgtggttttgatttgcatttctctgatggccagtgatgatgagcattttttcatggtctgttggctgcataaatgtcttcttttcagaaatgtctgttcatatccttcacccactttttgatggggttgattttttcttgtaaatttgtttaagttctttgtagattctggatattagccctttgtcagatggatagattgtaaaaatttttctcccattctgtaggttgcctgttcactctgatggtattttcttttgctgtgcacaagttctttggtttaattagatcccatttgtcaattttggctattgttgccattgcttttggtgttttagtcatgaagtccttgcccatgcctatggcatgtatggtattgcataggctttcttctagggttttcatggtttttggtctaacacttaagtctttaatccatcttgaattaatttttgtataaggtgtaaggaagggatccagtttcagctttctacatatggctagccagttttcccagcaccatttattaaatagggaatcctttccccatttcttatttttgtcaggtttgtcaaagatcagatggttgtagatgtgtggtattatttccgaggactctgttctgttccattggcctatatctctgttttggtactagtaccatgctgttttggctactgtagccttgtagtatagtttgaagtcaggtagtgtgatgcctccagctttgttctgttttgcttaggattgtcttggcaacgtgggctcctttttggttccatatgaagtttaaagtagatttttccaattctgtgaagaaagtcactggtagcttcatggggatggcactgaatctataaattaccttgggcagtatggccattttcatgatattgattcttcatatccatgagcatggaatgttcttccatttctttgtatcctcttttatttcattgagcagtggtttgtagttctctttgaagaggtccttcacatcccttgtaagttggatttcaaggtattttgttctctttgaggcaattgtgaatgggagttcactcatgatttggctctctgtttgtctgttattggtgtataggaatgcttgtgatttttgcacattgattttgtatcctgagactgctgaagttgcttatcagcttaaggagatttggggctgagacaatggggttttctaaatatacaatcatgtcgtctgcagacagggacattttgacttcctcttttcctaattgaatatcctttctttctcctgcctaattgccctggccagaacttccaacactatgatgaataggaaggtgagagagggcatccctgtcttgtgccagttttcaaagggaatgcttccagtttttgcccattccgtatgatattggctgtgggtttgtcataaatagctctgattatttggagatacgtcccatcaatacctaatttattgagagtttttagcatgaagagttgttgaattttgtcaaaggccttttctgcatctattgagataatcatgtggtttttgtcattggttctgtttatatgctagattacgtttattgatttgtgtatgttgaaccagccttgcatcccagggatgaagcccacttgatcatggtggataagctttttgatgtactgctggatttggtttgtgagtgttttattgaggatttttgcatcgatgttcatcaaggatattggtctaaaattctctttttttgttgtgtctctgtcaggctttggtatcaggatgatgctggcctcataaaatgagttagggaggattccctctttttctattgattggaatagttttagaaggaatggtaccagctccttcttgtacctctggtagaattcagctgtgaatccatctggtcctggactttttttggttggtaggctattaattattgcctcaatttcagagcctgttattggtctattcagggattcagcttcttcctggtttagtcttgggagggtgtatgtgtccaggaatttatccatttcttctagattttctagcttatttgcatagaggtgtttatagtattctctgatggtagtttgtatttctgtgggattggtggtgatattctccttatcattttttattgcgtctatttgattcttgtctcttttcttatttattagtcttgctagtggtctatcaattttgttgatcttttcaaaaaaccagctcctggattcattgattttttgaatggttttttgtttgtctatctcctccagttctgctctgatcttagttatttctagactcctgtaggcttttgaatgtgtttgctcttgcttctctagttcttttaattgtgatgttagggtgtcaattttagatctttcctgctttctcttgttcacatgtagtgctataaatttccccctacacactgcttaaaatgtgtcccagagattctggtatgttatgtctttgttctcattggtttcaaagaacatctttatttctgccttcattttgttatgtacccagtagtcattcatgagcaggttgttcagtttccatgtagttaagcagttttgagtgagtttcttaatcctgagttctagtttgattgcatgtggtctgagagacagtttgttataatttctgttcttttacatttgcagagcagtgctttacttccaactattttggaataagtgcaatgtgatgctaagaagaacgtatattctgttgatttggggtggagagttctgtagatgtctattaggtctgcttggtgcacatctgtgttcaattcctggatatctttgttaactttctgtcttgttgatttgtctaatgttgacagtggggtgttaaagtctcccattattgtgtgggagtctaagtctctttgtaggtctctaagagcttgctttatgaatctgggtgctcctgtattgggtgcatatgtatttaggatagttagctcttcttgttgaattgatacctttaccgttatgtaatggccttctttgtctcttttgatctttgttggtttaaagtctgtcttatcagagactaggattgcaaccctgttttttttgttttccatttgcttggtagatcttccttcatccctttattttgagcctgtgtgtgtccctgcacttgagatgggtctcctgaatgcagcgcacactgatgggtcttgactctttatccagtttgccagtctgtgtcttttaattggagcatttagcccaattacatttaaggttaatattgttatgtgtgattttcatcctgtcattatgatgctagctggttattttgcccgttagttgatgcagtttcttcctagcatcgatggtctttacaatttggcatgtttttgcagtggctggtactggttctttctttccatgtttagtgctcccttcaggagctcttgtaagacaggcctggtggtgacaaaatctctcagcatttgcttgtctgtaaaggggtttatttctccttcacttatgaagcttagtttgggtggatatgagattctgagttgaaaattcttttctttaagaatgttgaatattggcccctactctcttctggcttgtagagtttctgctgagggatcagctgttagtctgatgggcttccctttgtgggtaacccgacctttctctctggctgcccttaacattttttccttcatttcaactttggtgaatctgacaattatgtgtctcagagttgctcttcttgaggagtattttgtggcattctctgtatttcctgaatttgaatgttggcctgccttgctaggttggggaagttctcctggatgatatcctgaagagtgttttccaacttggttccattctccccgtcactttcagatacaccaatcagacgtagatttggtcttttcacatagtcccatatttcttggaggctttgttcatttctttttattcttttttctctaaacttctcttctcacttcatttcattcatttcatcttccatcaccatacccttccttccagttggtcgaatcggctactgaggcttctgcattcgtcacgtagttctcgtgctgtggttttcagctccatcaggtcctttaaggacttctctgcattggttattatagttagccattcatctaatcttttttcaaggtttttaacttctttgccatgggttcgaacttcctcctttagctcggagtagtttgatcatctgaagccttcttctctcaacttgtcaaagtcattttccatccagctttgttccattgctggtgaggagctgcgttcctttggaggaggaaaggcactctgatttttagatttgtcagtttttctgctctgttttttctccatttttgtggttttgtctacctttggtctttgatgatggtgacgtacagatggggttttggtgtggatgtcctttctgtttgttagttttccttctgacagtcaggaccctcagctgcaggtctgttggagtttgctggaggtccactccagaccctgtttgcctggatatcaccagcggaggctgcagaacagcaaatattgcagaatggcaaatgttgctgcctgatccttcctctgcaagcttcatctcagagggtcacccggctgtatgaggtgtcagtcggcccctactgggaggagtctcccagttaggctactcaggggtcagggacccacttgaggatgcaatctgtccattctcagatctcaaactccatgctggtagaaccactactctcttcaaagctgccagatagggacgtttaagtctgcagaagtttctgctgccttttgttcaactatgccctgttcccagaggtggagtctacagaggcaggcaggcctccttgagctgcagtgggctccacccagttcgagcttcctggccattttgtttacctattcaagcctcagcaatggcagacgcccttcccccagcctcactgccgccttgctgttcaatctcagaccgctgtgctagcagtgagcgaggctctgtgggtgtgggaccctccaagccaggcatgggatataatcttctggtgtgccgtttgctaagaccattggaaaagcgcagtattagggtgggagtgtcccgattttccaggtactgtctgtcacggcttcccttggctaggaaagggaattccccgaccccttgcacttcctgggtgagacaacgccctgccctgcttcagctcacgctccatggactgcacccactgtctgacaagccacagtgagatggtcccagtacctcagttggaaatgcagaaatcacccgttttctgtgttgctcacgctgggagctgtagactggagctgttcctattcggccatcttggaaccggcacacaccaattttttagaacagaaacaggatcacaatctacatattgtcttaacacatattttaatcatagataacagtatatctattcaacacaaaaagttaattctgaaaatctgcatcttcatcttacataaaacatttaaacttcccagaacaattgggaatgttaatgtttcatttattcatttattattaatattaatcaaggtcctattaggagacagaaaccagataatttgaaagtttaatatgaacaaattattaactataacaagagataggctagaaagaaagagaattttaaggaatgtaggaaaagcagatattccaagggctaaaacaaatcactcaaggaagaattcctgcacccttaccctccccagctgagatccagccatggctcaacaaatggcagaaaagtcacctgtctgtactggcagaacatgctggatatccaccttctagtttgcaggggaaagtccttcacagggaagcatctcactggacatgctgggctacaaacctgcctgtaggggtgctgctagttgccatgcactgaagctaaagcactgcagaagctgggtctacaggaacctgatgagagaaccctggagccaggaaggaaaaccccctcttcctgcaatgtcccttcaatatcttctgtagataaagtttaacaacgttccagctagccaaggaaaaatatttaagggcccatctcaatttcatagaacaggaaattaagggtgagtttgaaactgagggaaaataaataaacaagtggcacattccacaaacatttaatgggcacctgtatacttactatgagccagggactgtactgcatattggcccacatatgtcctttttgtttccatttattgagtgttgtttgtcactcctgttctaagcacttaaatgtacaaactcatgcaatcttcacaataaccctgaggtagatgctaggaccacccccatattacagaaaaaaggattgagatacagagagttaactcacccaaggtcagctagtaactagcagaaggataatttaaacctggtagtctccacatgcttaagtaccatgctacaaagcctctcaggatgtttttatggcacacaattatccaaaccccttcaagactatcccctgaccactctagtgtctgtatcatgttaaagcaaagaaaaatccccatccactctccatgcccccaaacattatcccagggttccaaaaagtacctggcaggactttatttgggaatagcagttccatatatcatggattagtgagtcctacctgcccacttagtgacagcagtggtcatctgttggcacccactgcatgatctggctacattaaggtgtgaggtccacaagaatggagagatgtgttctaaccacattctgaacattatgtgttgccttttttttctttttcttttttttttttttgagacggagtcttgctctgttgcccacactggagtgcagtggcgtggtctctgctcactgcaacctctgcctcccaggttcaagtgattctcctgtctcagcctcctgagtagctgggattacaagcacctgccaccacgcccggttaattttttgtatttttagtagagacggggtttcaccatgttagtcaggctgtctcgaactcctgacaccatgatctgcccacctcggcctcccaaagtgctgggattacaggcgtgagccaccacacccagcctgcccttcttaaattgcactcagtcttgagacactgctagcagctaagtgaatcttttatatcatttttatctttagtctgcaaatcctttctccaataattgcatgtgcctttctttactctgtttctattttgctgtgttctatatatagtaccagtgcctttcaaattgcatttctaatcagctcccaggtgatgccattgttgtggctctgggagccacactttgagtagtgagatcctatacaacacatccaagtaagaggaagctgttcacgtctctacaatagcaagatcctttcctgaaaacccaaaatctgccaggcgcagtggatcacgcctgtaatccagcacttggggagacaaaggtgggaggatagcctgagtccaggagttcgagacctgcctgagcaatagagtgagaccccactctccaacaataacaaaacccagaatctaacttttgtatcacaaatttgatgtgtagtgccaacagttcttgagcactaagagatctttacagccctctagtgactaaaactgtatcatagacagaaccaaaacagggactcacattcctggaaaatcatccatacacttaatactgggaataataatgacaataatccaaaactaatagaaataacaccagaataaggccaggtgcagtggctcatgcctataatcctagcactttgggaggctgaggtgggaggattgcttgaggctaggagtttgagaccagcctgggtaacatacaacaccctgtttctgcaaaaaattttaaaaattagccaggcatagtggggtgcacctgtagtccgagctacttgggcagctaaggcaggaggatcacttgagcctgggcattcaaggctgcggtgagccgtgatcacaccattgcgctccagcctgggcaacagaacaagacggtctcccaaaaaaaaaaaaaagaaaagaaataacaccataataagacaaataggaatgcttttgatcagatactaaaaacatctttacaatattacatatagtgaacaaatgatttatcatattgactgaccccttattacttcaatgtgcagggatggtacctatgaaaagcactgtgtaattgtagataatttgggacataagagcttgaccaaaaactgaaaatactattcctagaaaaaaagcaaaaatattttggacattaaaagccttaaaacaagataaaaatgaaacactgataagatcggagcttagttcagtccaagaaacttttttagcactaataccagacaatgtgctatgtggtggggggttacaaagatgccctgtgggagcttacagtcaaaagacagtcatatagactcttaatgtcatacatggtaaagactaagatataggaaagcacaaggtactgtgggacctcagattcaaatggggaaatgacaaaattggaagaaagtagacaactgagaggttcagcagtccagaagtcaattaataaggtcctgaactaagagtggtaacaaggagaaagaggagacagatctgaaaagtgttaaggaaaatacaatctacaggagtttgactggccatgggagtgcagaagatggaattacacttggataacagtacaaagtgattaaacgagatgagaaaaggaaaacagtagatttaaagtggcaggagatgatgtcttcagttgcggctctgttgagtttggggtgcctgtgggatatccaagtgcatattcaatggcaggtggatacacatcagaatatttgggtagagctaaaaaaacacattttgaagttactgacatagtaaaaattttaaacatgagatgtggaaagaaaagagcagtaggttagggatggcactttcagaatgctaactattgaggagagggcaaaggaggacgcattcaagaggcagagaaagtaatttctcttctttttttttgagatggagtccctctctgtcgcccaggctggagtgcagtggcacaatctcggctcactgcaacctccacctcccgggttcaagcaattctctgtctcagcctcctgagtaactggaattactggcgtctgccaccatgcccggctaatttttttgtatttttagtagagatggggtttcaccatcttggccaggctggtcttgaacttctgacctcgtgatcctcctgccttggcctcccaaagtgctgggattacaggcatgagccactgtgcccagctgtaatttctcattattcagaatattagaagagactagtaactaggaatatggaaattttcaaggaaggaatgggtaagtgttaaatacagcagagaggtccaatgagacaatgttagaaaaatgtctgctctgcctgggcacaaagtgaggtcccatctctacaaaaaaataaagaaattaggtaggcatggtggtgtgcaccggtggtcccagcaacacgggaggctgaggcaagaggatcacttgacgccaggaggtgaaggctgcagttagctgtgtttgtactactgcactccagcactccagcttgggtgacagagcaagatcttatctaaggaaaaaaagaaaaaaaagtctgctaattgctaattgtaggcgccctgagggcaggtactatgacttattaattcttatatactcggtgtctgttacaaagactgatacaatgcaggcagcaccctataaatgcttctagaattttactgatgtgacaatcacttgaattagtaaaataacacacttctacgattcaaaaagaaacatgtcggtactagatattgtagacatttttcccaagggagctttttcttgacccaactctgcctaaatttttagtagaaaaatattaataaaggaaatacagaaaatacctttccaacagaaagaataaaaagcaaagaaaaaggatttaaaaacgcaaaaaaaagagagaataaatgaatacaaaccaaaagattagtgtagcaatgtcaataacagaaaaatatgatttaagcaaaaagttatagtagaaatagaggaatcttaaccgaaagataaaaaagttcacttcacagaaaagctatctctagggcccagactcctgtgaggcaagagagatgatcgaggcgtgaaaatgcagtcagattttgtttttatttaaaattgcagcattttactaatcatagacttttttgcattaatttttatttttaaaaatattgcatccaaatattgcttatcttcattacggagttcttttggcggtcccttaaattctgcacctgaggctcgtgcctcattttaattctggctgtggaccaggagggtacttgggcgtctgaaaacataaccccaagtgttgtatcacataagtagacagaaatgcaagaaaaaaaaaaactggcataatcccaataacagtgggagattttaacatacccgcatcaaaagctggccgatcaattaaaaaaaaaaaaactagtaagggttagggaatgcgtgcacaatacaacgttttctcctgcagctctgtgaagggcagcccgcggtaggctaggcctggtcctgggcgccccagccggctcccccgggtccaggcgtgcgcctgcgggcgacgtgcgcgtctgggcatccggccgtcacgcgctgcctgggactccaccctacctacccttcgcgtagtacttgttatactttggcagcttcttcacgtcggtcctctccgcgcgcgggtaggaaccgtccacggccttaaagaagcctcctcaccaggtcagtggcgccaagcaggttgcgtacgcgcagaggcgggaagggcggctggacgtcgcccaggtaaacgacgtcccgcgccacccctttcttgttgctgtcgctctgcacttcccgcgctcttccttgctctctgcttcggctaccgcccgctgttttccacttcagtctctcctggtccacggcagccacgactacagataccagtagcgcgacagcctcaaagcgccataacgtcgtgcttttcttttttcgttctttctttctttctttctttttttctcgtgctttgtttcctctgattttccttttccgggtttttagttgaacacacgtttttttcgtgtatgtgttttaaataaatgcatttagggctaaatttaactgtaccccacccattataataaatagtacttttacgattttccagaataagattttgtggtttcctctttaacccatgagttgaatgctttgtttctaagcttagagccaaacatttatttattattagagacaaggtctctgtcgcccaggctgcaatgcaattgtcagaggcgagtgaaccagagcaactcccatcttaaaataggagctaggtaaaatgaggctgaaacctactaagctgcattcccatctaagtcacaggatgacataggtcagcacaaaatacaggtcataaaagaccttgctaataaaacaggttgcagtgaagaagccggctaaatcctaccaaaaccaaaatggccacaagggtaacctctggtcgccctcactactacactcccatcagcgccatgacagtttacaaatgccatggcaacgtcagaaagttacccgatttggtctcaaaaggggaggcatgggctggacgcagtggttcacgcctgtaatcccagcactttgggaggcagaggcgggcggatcacgaggtcaggagatcgagaccatcctggctaacacggtgaaaccccgtctctactaaaaatacaaaaattagccgggtgtggtggcgggcgtctgtagtaccagctactggggaggctgaggcaggagaatggcgtgaacctgggaggcggagcttgcagtgagcagagatctcgccactgcactccagtctgggcaacagagcgatacagagcgatactccgtctcaaaaaaaaaaaaaaaaaaaaaaaaggcggggggtaaggcatgaatagtccactccttgtttagcatatcatcaagaaataaccataaaaatgggcaaccagccaccctcagggctgctctatgaagtagccattcttttattcctttgctttcttaataaacttgctttcactttgcactgcggactggccctaaattctttcttgcacgagatccaagaactctctcttggcgtctggatggggacccctttcctgtaacgcaatggcaggatcaaagcctccaactcctgggttcaagtgatccccctgccttagcctcccaagtaggtgggccacaacgcctggctaatcttttaaattttttgtagagacagggtctcactatgttgcccaggctggtcctgaactcctggcctcaagcaatcctcccacctcagtctcccaaagtactgggattataggtatgagccaccacacctggctcaaacttttaaactattactttgcacaggaaccttcacttcaaacactaagaatttaaaaaaggagccatgactgcaaatacagtgagataaagctatgacactttgtgagaataaagtagaaattgtggataaaatgaacaatttcttggaaaaataataaatatataaatatatatgtaaatatatatatattatatatacaagtaagccaataacaaatccaacttaaacatctttcctcagacaccaggcctagatagttttttaagttttaccaaaaattggaggaacagaaaatctttatcttatacaaactctttcaaaggatggaagaacagagaaaactacctaatgcattgttgagattaacatacccttaatacccaaaacatggaaggatggtaacagggtataaaagtatagattaatttatgaacagaggtgcaaaaatcttaataaatagcatatcttatacaatatataaaaattaatatattatgaataagtatggtttatcccaggagggcaaggaagaaaatagattaatccaccgcagcaatttaaaactttcaatgggctaggtactgttctaggcatttagcaaagtaacagattttaaaagagaaaaatcctttatttcctacacaggaattgagaagaaagagatgaaaatgacgatttacctgtaaaactggagtatctactccaaactattaaaaataaaaaaattcagcaaggttgctggatacaagagcaacattaaataatcaatagaattcttatacataaaaattaactaattagaaaaaagtatttttaaagagttcattcacaatacaacaaaatatataaggtacctaaatatagatctaagatatacgacattatcttatcattttcttcataaagatcttggaggaccaagaaaatctgaatagatagagagataattccatatttatgaatgggaagacaatatatttcagatcttagttgtaaacttagtgcaattccaaccacaattcctgaaattcttaaagaactaagcaaactgattctaaaatttatctaaaaggtaaaggatcaagaacagccaagacaattttgaagaataaattgagtgggaagacttattgtatcaagttttgagatttattaaaaagtgtcttagttgaaacatgtggaattgatgcagagatcaataagtagagcatgagacagaagaaaaagcccagaagcagacctatgtgtatgtgtaaacttgaagatttaaggagtgtctgcatatcagtgagatggggtggttctgttatggaaagaacaatcctgccaatgaaagattcctctgtaccaatacagaagagaaaaaaaagtattactgagtaagcattaacacatttacaagcatgtacggcagcacaaaagtgactatgaaattggaacagaattttatatagcatagcagaagaaagaataacttctcacctcctcaaaagataaaagggtcacaccttgtgacagtttctacacgtcttgtgagagaccctgagctaaatccagaggtgtttttaaaaatacatctggaggttatttggcccttggccttggatatatatagctattattacaaaaactgaagagtgggcttaatccttgtagagatttatctcaatccaaaagtaaagattaagatacactatgtctttaaagaacctcatcttaagaatggaggaaaggaggccgggcgcggtggctcacgcctgtaatcccagcactttgggaggctgaggtgggtggatcatttgaggtcagaagttcaagaccaacctggccaacatggtgaaacctcacctctactaaaaatacaaaaattagctgggcatggtggctggcacctgtggtcccagctacttgggaggctgaggcaggagaatcgcttgaacccaggaggtggaggttgcagtgagccgagattgtgccactgccctccagcctgggcaacagagtgatactctgcctcagaaaaaaagaaaagaaaaaaaaaaacggaagaaagggatgggtgtggtggtagctcatgcctgtaatcccaacatttggggaggccaaggtgggcggatcccttgagtccaggacttggagaccagcctgggcaacatggcaggacccccatcttttgaaaagactttttaagtaaaaaatacatacattttaaaaagtatggaataaagggggaagtggtttctttgccctttgtaaatggagaaaaaaatttcatttaccactatagttctgagacaataggtattctcatgcaaaaactttttttctgactcacaatctataaaaaataaattacaggggtaaaaaagctttgctttttaaaacaaaattattattatgttatttttatgatatctgactatgggaggatttgctaaataagacataaatggcaaactgtaaggaaatacttcaaagttaaaagatacacttaccaagggggagaaaatattttctaattactgagaagagataagtatcccaaatattttatgagttcttataaataattttttaaaaatcaaggtaaaaaaatagctggcaaaaataagatttggcaattcaaagagaaaatgtgaatgattaataacttaccagtaggggaacacaaatgaagccacattaaggtacaatttcaaccccatcagattggcaacattttaaaacgacattatgaaaagttgttgaggatgtgcagaaatggaactctcatcaactgcaggtatgagtgtaaattggtataatcactttgtagagcaatttgctggtatgaaatatagttaaagatgcatatatcctacaacctagcaattccatgtgtaaatctgtttttcaagaacggtggttctccaaatgtgttccaggactagcagtatcaacatcaccagggaagttattagatatgcaaatattggcccagcatggtggctcacacctgtaatctcagcactttggaagggcgaggcaggcagatcacttgaggtcaggagttcaagaccagcctggtcaacatggtgaaaccccgtctctactaaaaatacaaaaattaaacaggcgtgttggcacacacctttaattccagctacatgggcagctgaggcaggagaatctcttgaaccccggagacggaggttgcaatgagccgagatcgcgccactgcactccagccttggtgacagagtaagattccatctgaaaaataaataaataaataaataaataataagatatgcaaatgttcaagcctcccctcagatttactgaatcagaaacctgaggtaagagaggtatttgattttgatacacattaaagtttgagaaccactgctgtagagaaattctcacacaagccccaaggagacatctagaaaagcaaataaagtataaccaaaaggcctaaaaagtgccagaatgtatgtattcaaattccagccccactatttatttcttggccctttgatctcggggaagttatgtagtttttctgcatattattacccatttataaaatggtgattaatatactttcttctgcatatagttgctgtgtagattatttaaattaattcacacatggcagttacactagtgcctggcacacagtaagaactcaaacaatgtctgttatcattaggatgtttgttgtagccttgcttgtaacagtaaagtactggaaacagttacttaaaaataagactgaaggcaaatatggaaaagacttaacattaataacatttgggtgatgagtatataggtgtttttattattcttggtagttcctctgtgttgaaatgtttcacaaggaaaggggaatagtagttaagtcatcatttatttattcacatctacatttccacagaagtattagtttaggtgaattgtcatgtcttgatttttaaagtttccatagaaagaggttactgaactcgtgttattggtataaaatataaagctgtctggcctcaaaatacttttcatgtcatcctcctacaacttacattcataaattctatattccaaccaaatttgcatgaatctgcctttttccacatttgtatctttacacccactgtctcctctatatttactgccctattcatattctatccatttttcacattttcagctcaaatgccaccaccttgataaagatggacccaagtctctataatttatcgcttctgcctttcagtgttccagataccattctgtttatcacatagcccttgccacattttctcttatgttagaaatgttttccccctactttctttcacacacactctacagaagcacaccattatttttaatggagcaaaagttgatacaatctcaaaaatgccagagcaaactgattcaaatatgatttaaatactgatttcaattcactgcatagacacatcagatgctacccatggaactcctatactctgggcttcactggttggtgagtagaaattgtgatgttctgggtccccactttcttgcctggcagtaattacaaagttgctgcaggatttctcaatccaaatattcttgacaattctcaaatagtgggtcctggagaagggtactttccctctaagagtctgggggaagttgacctgatagtgtaggagggatgatcccttgcataatcagaacccttactcccagttttgtggttcctctgttgggcagctgctctggatccatttgaaacccactggtggttgcccacttctccagagagctgacctcagtgcctgcttctcaggccagctgggaaacgcatctgctgatctcacaaatcacttttcagagaaattcccagatggatctgttgggctttgcccttcccaaagcaaagggagcacctctaggaggggttagggaggcagttgggggtggatcaggcaaagtcttgcattatacctcagatccttgctcattcatacctctggactccgctgctttattaagcccactctgcaagacttctcttattttcagtaatagtcacatatttctcttcaggggaaccccttctccatcatacaggtttgtgtttgtgtgaactccaattctggaacataagctggttattttccattatatacctgaccaaggtggtctttgcaaacaggttttggcctccccgacctcttatcagcttgcctccccaacaacctctccaacaaccattgttcagtatcatctgaacaaaactatgtaaatgctgaagaaatgtcacataatcatctttttcagcctaattgacacaccaaaatctctcctatatagaaattctggagtcataattgaaataaagggaagtagctgatggctttttaaaaatggaactattctgacaggaggctgcaggagggaacctctagggggcgatgttatctaacagaattttacagttgccctattcggaactacccagtttacattctccattgcctaacttcccatgttctctccaaagttgtttcctggcctcttatattttctgcttcctctggagggcactagttgcacctactaacatgtaataaatgctggcctgcttcttgcctttttatagttaatgtgacttagatcaagtgatctccagctgagcccatcctacgtttatattaatatttgagaaatgcaatccagtttactaagtatatataggcccccggtactcttctggcttaagactgtttgaattgatatcagcactcagataactcaaattcctaaacacacagattttcttgtgattcttaattgctaccatgcttctgaaagtatgtttcctattagagttgcttgggccacagctaatctttgaggctagtaacgcttcatctttctaccttcagggtctagcgtagtgattcacgtatagtgagatgggtggatgaatgggtggatacgtgataaatccaataccttgttcaggatattaagagtttgacttaggcagcacagcatagctaaagaaagaaacagttttaggaaataaatgcattaataaatgtaggaacaaccagtattcacaaaccataaaattctccattttaaagtataaaattcagtggtcttcaatatattcacagaattgtgtgatcaccaatatctaattccagcacattttcatcactccaaaaagagatcttgtacctgttcacagtcactccgtgtcccctcctttcactcgtccctctccatcccttagccccccagcccctggcaaccactaatctactttctgtctttatggatttgcccattctggatctttcatataaagggaatcatacagtatggcctttcgaatctggcttctttcatgtataatcccataaccctttgaacataactctttaacacttattttgctgtgttgggattattatggcctgcctcccactggactattaagcatcacaaggacagattatgccttatttcaactttgaatgcagagctcagggcctgtcacagaatgggcaatcaataaatgtttgctgaacgaatgatgcttttccagttccaaaatgcatgaaacaccgtgttgacctcactcctttcatctttgatcagtctgcagtaccaccagaatccttgtctgtaactcttttcatctctttcacttgttttgtgtctttgcctaaatttacattttctctttcacaaatatagcttaaattccagaaagtgggaacatgtcctgccccaagtctgtattcacaaagccatgtttgccccttgtttgtgtggattaacattgtttctctgaaatctttaaaatgagaaccatgccagtgttctataaaccgtaaaatttaacattttctttcttttcttcttttagccatacttcccattgcctccagctgttgcacggaggtttcacatcatatttccagaaggctcctggaaagagtgaatatgtgtcgcatccagagagctgatggggattgtgacttggctgctgtcatgtgagtgctcatcagccgggaggtctaaacctgcacagtgattatttccctgcccaacgaataataggttggaaaggctttgcttgattacaacatacaaacaatcatccaaacaagggagggaagagtaaatattctgtccattaggccccaggctccctggagtaaattcatagtctctctgtccaaagatgtcctgagccccataccagcacaccatctacttccaccctgtagtgctgtggttaggactaaattcccccagtcaccaaaaagtgttcatgactttcccaagcaaaacaaaaccccaaacaaaagataactctgttatatttcatggcttttaaccttttttagtatatgggttgctgtcatttctactttatgaattcatcaggagcatattataaagttcaaaaagttaggctgggtgtggtggtttatgcctgtaatcccagcactttgggaggccaaggcaggggtatcgcttgagcccaggtgttcaagaccagcctgggcaacatggtgagaccccatctctacaaaaaactttaaaactagccaggcatggtggcatgcacctgtagtcccagctacttgggaggctgtgatgggaggatcgttgagcccagttcgaggctgcagtgagccgtgctcatgccagtgcactccaacctgggtgacagagttaaatcccgtctcaaaaaaccaccaccaccacaacaacaaaaaggcaaagaaaaacaaaagaaaaggttcaaaaagaagcgtggaaatatctatacctgtcacagtgctatatgcaatccaatcagaaatgccaatccaatctctgcttttgattctgtggtgttggttcacagtgaagcctcccacccctgcccctggctcagttattaaaagctttgtttgtatatgtacttaacatttctatggaggctctaacatctgaactgcattggtatttagtaaatctggattctgacaacaatgctgtgaggaaagcataaatgatctcccaatcatacacaggagaaagctgtgactcaggttacacggttcacttgtgtacagctcgtgaattgcagaaacaggatgtgaacccaggtctcttagttcagaacacttgtacacctccaatgtcattctaaagcagtggtgggactaaccataaaataccctctccaaactctactgcatccgagtatcaggcatctccctggcatgctggttttaacaccatttgtggctccaggtgatgctagtgagtcatttggtgctcctttctttgggctataaataaacccattgcttatgcctgagctcctgagtcactcagaaaccttattctttcagtgaattcaacaaatatttatgaattaacaattatgcaccaagcactgttctatatgctggggatgcagtggtgacaaaatgggttctgtctgcctagagtctcaaggggactctttatccagctgggttctgcagatcatcttaatgatttgagatgatctctggaatttgaaatatattttcccccctttcagagggatttatccattattcaattttgaggaaaaactgctccaagataagcgttcttaaaagttcagaggaagagtttgtaagatgtctgttgatagactttcatcaggttaggggctgtgaacttcctgaaatttttgtgtatgaacctgtgagcatttttagagggtccataggttttataagattctcaaagtttctgagatcaaataaagtttaaaggtcacactcagggtcagatgtaggggaggaaacaattcttgattcaaacttgtattaagcatgagtgtctttgtgggagaagggagaagcctgagaattttctcagcatctcctcagttcaagccaccacgtggctccattggctcaggtggtttagtcattgggaaccagcatcatctgtggcactccaggggctacataccaatgaggattctgaggggtgctccaagttcccaacttctttgaaaaattccttggtacatgtctggccaagattctaccagtcttttatttaatcttaaagaatattgttggtaatagttggaaagtaaaaaattcatagacaatgcgtggatagacaatgctctaggtagttagaaacagctggatatttgtgtcaagtggacacagctgcactaaatctgtctgaacctgctccagttgctctgagaaactccaaattttcaactcctctcaattccttccaccttattggcacatatcacctcagacttgaagcttgaagcttgtaagggctccaataggactcccagaaaggcttggagaaaaaaaacagaggaagtttctgtgggtgtataagagattctggaggttatccagggaaggtattggtaacaggattttcagggatgtttctttgggataagcaggtgtcagagatctgaaaggcataggaacagaaatgatgttttgctgtgataagggaaaatataatcagaaacataagtcttcattttaaaaaggactcaattttaattaaagaggaactaggaagccaatcagttggatctaaaaatatttactttattcaagcacaatttgtaaattgacctctctgtgctaagaaagctgaaaaatacagagttgttatgacctaatctcaaataaaattaaatttaattctgtagtatttttttaaccataaattacagatcctgtctgttgtgtttcctgatgttcaacaagaatagataaagattctcttgttttcagattagtttagtatggagcatgtctttacttatctaaaatgtagtcccttatccctgactgggtataaagactttaagatttgagaaagtgtttaagatgcagaaagcattgctaacactggaaatgtaattcccaagtagcatgtattactaataacaattaattaatataagtcaacgtacggtaaacttactaggcttctttcttttctgcctagaaataggtcctatgttttataccttataaatggtcattgtagtttttgatgcctgagacagcagttttcttgttcaaactcctctacagtgacttcattaatgagcttctgaatgtttctgaacataaatacaataacaggttgtttatcatggccgggcgcggtggctcacgcctgtaatcccagcactttgggaggccgaggcaggcggatcacgaggtcagaagatcgagaccatcctggctaacacggtgaaaccttgtctctactaaaaatacaaaaaaattagccgggcatggtggcaggcacctgtagtcccagctactcgggaggctgaggcaggagaatggcgtgaacccgggaggcggagcctgcagtgagccaaggtcgcgccactgcactccagcctgggtgactccgtctcaaaaaaaaaaaaaaaagttgtttatgttgggcagaggcctgaggattcttgaatcaaacagacattttttgttgtgagaaaatttgaggtttttaaatagaattatctggaaggcttgagtagtttttcagatgtggttgtgaggcgttgttgtgtttagaggaatgggtaaagaaataaagtttaagggatattaaaggtataatctctatggcagggccacccctttacgtccatcagactatctccagctatcctcctgagggttaagaaaaaaaaaaagggggattggcctcaggatttcttacagtcaaaactctccacctacaaactcaccgttgggaaggtggggattggtgcccatcagaatactatggaattgcgagtaggggaaggaatgtggaataggccagccccgtttccaacattacttcatctctttctatcctggtggaaaatacatgggatccaagtagagatttaagaagtttttaaactttaggattctaaaacatcatgggatctcagatttgggagctgtattctggtagctgatttttttccccagttgaattacattgagaggttgcctcaccagcaagtctttgaaaaagcccacatgctagttgttgcctgttttcctatggtcctccacctttctgaatcctctgtctatatctcttccatctggttctctccttcagccccggtgccaatgcccctccctgaatcccatctctcttatttttataatggacttgaatcgtaggtctttcctgtgtaacttatgggcttatctgcatgtcacagaaatcttctcttttttttctttttgagacggagtttccctcttgttgtccaggctggagtgcagtgacatgatctcagctcactacaacctccacctacctggttcaaacgattctcctacctcagccttccaagtagctgggattacaggtgcgtgccaccatgcccagctaatttttgtatttttagtagtagagacaggggttcaccacgttggccaggctggtctcgatcacccgacctcaggtgatcttcctgcctcggcctcctaaagtgttgggattataggcgtgagctaccgtgcccagcctgcatgtcactaaaatctttatctgctcagtttctttctgacatcacagggagaggcaagagttttagtcctctggaaagggtaggagcttcagtgccagatttttgtttgtttgtttgtttgtttgtttttgtttcctacgcaacagtgctacagccacgttttctcctatgatagcaaaccaactgaccatagtgagaattaggctgtttgtttttttttaagactctctatctaatacacatagggaatatattattctcttattaagatgctccacttctttcaaattaatattccccatatgctggctttattatgttaaagctcatttgtaactttcccccgattctccccacttttctcccatttcagtagtccctacattagctgaaaaagattcaacttgcgtcatctagaaaaatagcagcttattctctaccccacctctgttttttccctgaataacagggtcagaagtttcaatttatctggatacggaaatactatatatgtagagccagcaggatttgtgacatttggtaagagctgatgacccctcatgaggaaattagaagtcaccaatatctttttcaacaaaaaaaattattctagttaccagaaactgtgcatgctgtagcattctcccagcccactgtgaaaacttcatatagaaaaatgaaaatgagccaggtgcagtggctcatgtctgtaattccagcacttcgggggctgaggcgagtggatcacctgagttcagtagttcaagaccagcctggccaacatggtaaaaccccatctctactaataatacaaaaattagccaggtgtggtggtgcacacctgtaatcccagctactcgggaggctgaggcagaagaatcacttgaacccgggagacggaagttgcagtgagccgagatcatgccattgcactccagcctgggtgacaagagcaaaactccatctcaccaaaaacaaaaaaaaagaaaagaaaaatgaaaatgaaagcacattctgaactgtggcatagatctatatcatattaaaatgttaacaaatgcctagaatatcttagttttgttttgttaatttaagttttaaattaagtttaagttttaaattagtttcagttttgaataaggcgttttcaagacacttctagactattcctccttcaaggagcataactccagtaggaaagatgagacaagtactcagataaaagacagaataaagtaagtgccagaaaagagataactctcaccgtggagaatcagaggggaaaaaagacggcatctagctgagagaatctacaaatccttacggatcagaaaaatctcaaacaaaccttaaggatgtgtttgagatgggctgtgaggatgaattggttttgttgggttcacttggtttttattattgtctcttttcctccttttcttcttcctcttttttctccctccttttctccttcttctcttcctcatccaattccttcttctccttctctttcttttaatactctctgatgatatctgaggacccacaggcagcagtgtttgtaaagtcaaaattgaaccttgtggtgctcagctttagaattcacttcatttctacacttaattcagaaatttagtctgaatttagtctctaggaatacagtgtcccaaagtgggagctgcatgtaagtcactaagtgattatttatatatgttttatatcagtgactttcttttgcttccttttctaacagccttcatgtcaagcgcagaagaatctgtgtcagcccgcacaaccatactgttaagcagtggatgaaagtgcaagctgccaagaaaaatggtaaaggaaatgtttgccacaggaagaaacaccatggcaagaggaacagtaacagggcacatcaggggaaacacgaaacatacggccataaaactccttattagagagtctacagataaatctacagagacaattcctcaagtggacttggccatgattggttgtaagtttatcatctgaattctccttattgtagacaacagaacaaaacaaaatattggtttttaaaaaatgaacaattgtgcggtatgcaaatgtagccaataatatactcaactggaaaatgaaatgaaaagataatactggctgggtatggtggttcacaccttttatcccagcacttcgggaggctgaggcaggaggatcacttgagaccaggagtttgagaccagcctgggcaacatagcaagacctcatttctacaaacaaaaaaaaaattggcccggcatggtagtacttgcctataatcccagccacatgggaggctgaggtgggaggatcacttgagtctgggagagtttgaggttgcagtgagcagcctgggtgacagaatgagaccctgtctctaaaaataataataataatgatagtgtatatcttcatataatattttaagaggagcatatagatataacttctcccaactttttaattatagttttccaaacttacagagaagttaaaagaatggtacaatgaacatctatatatctttcaccacaatattaatcattgttaatattgtgtcacatttgctttctctctcctctctttgtatgtgtttctatataaaatattataacttttaaaatatatcttgttttgctaaaccatttgaaaataagttgcaaaaatcatgacacttcacccctagtttctttttggtgttataacttgacataccctaaaataaagacatttttctacataatcaccttatcagttttatacctaaaaaattaataatttcatctaatatattccatattcaaattttcccaactatttagagagcattttatgtagtttttttttcactccagtaatcaatcaaggttgacatacatattgcaaataattgttatttttctttaatatctttcaatctaagaaagttcctctgtcttttttttttaatttttaaaattattttgttgagggagggtcttgctgtgtcttccaggctggagtgcagtggcacaattttgattttggctcactgaagcctcaacttctagggctcaagcaatcctcccacctcagcctcccgagtatctgggatcaaggtgcatacccaccacacctggctaattttgtttattttttgtagagacagggtctcactatgttgcccaggttgatctcaaactcctgggctcaagcgatcctcccaccttagcctcccaaagtactgggattataggtgtgagccacagtgcctggcctaattattttcttgtgatcaaattcaggtttaatgtttttggttaagaatttcctacgtgaattcgtgtacttattttgtcatttagagttcataaatattagggtttattttctaaatagaatagtttaaactaaatataacttcaaaacgtctagtttgagtagctaccgttgtttggattgaaattttctgatactgaaaagaacaaaaagcctgcctttctgcccagaaccttttgcctcccccagtcagttcttggagcagcactagttaggggcccagagttcggccttctgtgtggtgattttacgctctgcctaaacaaggagcctacatcttttagctcctattccacccttctcacacgtttttgttgttgtttggttgtttttttttgagacagagtctcactctgttgcccaggctggagtgcagtggcacaatctcggctcattgcaacctccgcctcccgcgttcaagtgattctcttgcctcagcctcccaagtaactgatattacaggcgcccagccaccacaccccgctgatttttgtatttttagtagagacggggttttcccacgttggccgggctggtctcaaactcttgacctcaagtgaaccacccgcctgtgcctcccaaagtgctggaattaccagcgtgagccaccatgccgggctcacacgtttgagttgataccattgtgccattcctcttttggcctcttttttgtccatagaggcttcaagatagataggtaagagcccagtagtgttcataagaagccaatagagagcaggagccactttatcaggtggcaggtgtcctgggcctccctgctggctagtcccaagcggtggtgttgccaggatgtcttggaggtgataatgggacacacagaggcactgagtctccataggttaaaatgccaccaaaactggcctttgcctaatatccctcattgactatttagcatttaatttatttattttcctgacatttctgcaagctttgtatttatatttccactttatagatgaggaaatttgaggctcttagaggtaaaatgacttgcccaggtcacacaggaagtggcagagacaagctttttaaataagaaaaaattaataaaatataatatgagagtaacttaaaatattaataaaccacaattttaaattaattaaccgtgataaccaacattaataaaagttaagataccaaaacactggtgtctaattctttcaactaacaacttgaattattttccattttaaattaattaaccgtgataaccaacattaataaaagttaagataccaaaacactggtgtctaattctttcaactaacaacttgaattattttccattttatttcttcttactagatcgatctgcaattctacacaattgttgggcagctatgaatgacagtaggtttacatgatatattttaaaaactgatttttctgccacgcaaataattgaactttgtctgaagatagtgtgcctgggaaaccagattttttttatttttatttttatttttatttttttgagatggagtcttgctctgtcaccaggctggagtgcagtggtgcaatctcggctcactgcaatctctgcctcctgggttcaagcaattcccttgcctcagcctcccaagtagctgggactacaggtgcgaaccaccacatctggctatttttttgtattttagtagagacagggtttcaccatgttggccaggatggtctcaatctcctgaccttgtgatccacccacctcggcctcccaaagtactgggataacaggcgtgagccaccgcgcccggccaaaaccagattcttaaagaaattacattttacaggttattgcatgtgcttagtaaaacattattgtatcactgttactgtactatgtactattattgtactaagagtaaatactgttactatatcatgagttactgtattatgagtaaatcacctcgttaatcctttaagttttctttttgaaaagttacatttttattgaagtaatataggtgtgcgatttaaaaaatcaaaagtacagcagaatttataataaaaataacatcctcccaccctatcctccctactcctagacctatccttgaggcaacatcttgtaatccttttttttgagacagggtcttgctctgttgcccaggctggagtgcagtggagcaatctgggcttattgcaatcttgacctcttgagctcaagcaatccttttacctcagcctccctagtaactgggactacaggcatgtgccaccatgtctggctatttttaaaaaattattattttctgtagagacagggtctcactatgttgcccaggctggtcttgaactcctgggcttaagcgatcctcccatctcaccctcccaaagtgctaggattacaggcatgagccactgcacctagctttcttaatcctttaaaaagtttaagttctggccgggcgcggtggctcacgcctgtaatcccagcactttgggaggccgaggcgggcggatcacgaggtcaggagatcgagaccatcccggctaaaacggtgaaaccccgtctctactaaaaatacaaaaaattagccgggcgtagtggcgggcgcctgtagtcccagctacttgggaggctgaggcaggagaatggcgtgaacccgggaggcggagcttgcagtgagccgagattgcgccactgcactccagcctgggcgacagagcgagactccgtctcaaaaaaaaaaaaaaaaaaaaaaaaaaaaaaaaagtttaagttctagtggttacttctgtgatttcaaatgaaacgcttaaagtatcatttctttgcttatctcttcccttctttctcctcatcccagtgcttgatgtttcattacaattatttttctttatctctgtaactttcaataatatacttgtcttccatttattagtctttttaaaataactttttcttttttctttctttctttctttttttttttttttttgatacagagtctcactctatcacacaggctggagggcagtggcaggatctcagttcaccccaacctttgcctcacgggttcaagggattctcgtgcctcagccttccaagtagctgggattacaggtgtgcgccagtacgcctggctagttttagtattttttgttacagacggggtttcaccatgttggctgggctggtctcaaacttctgatctcaagtgatccatctgccttggcctcccaaagtgctgggattacaggcatgagccactgcacctggcctacgtattaggctttatgtaagatgtacatagtactccatactcctttccttttcctcctattgaaactgttcctataaactttataaaattaatcagagaagaagagagggtgagaaacataaataatccaagcttgcaccacattcagcattaatcactaggtcactttgcttgctgaccccttcctcatagttgtttggctattgcttcagaattatgtggagtctgttacaagattatagttccccttaactgctctatagataacagcttgaacattatgaaatgctaagttttcccttcgagacattctttcaggtcctgcatactgatgaaactactgatgtcagctggtctgaaggaccctaccagaagctaaatcatcaaagaatgcaatttccatatcctaatgattcaatctcccttaccctgaccaatcagtggcccaaattttccagccccttgcctcccagaaccccagcccagaactcttcagagatttaagaatctcctcctacctcctgactcagcaccatgtaatcattaaactctctgctgcaaa

SEQ ID NO: 779 - DNA, 80395 bp, Homo sapiens
gtctcttaggagtgaggtacctggagttcggggaccccaacctgtgacaatgacagcagacaaattggttttctttgtgaatggcagaaaggtaagtaggagctgacctttggttttgtgtcccttctccctgggaggggaaatgtgtcctctggcagagccatatcttgttctctgtctttcctgtcccctcttacttgttctgtctttctctctctcgctttaaaggtgtcgctgcattttggtaacattagggaagaagaccttctcggggctagagcacagacaagatactcagaggccaaagaatgagggagagagaggcaagcagagaggcatctgtgagctagctgccaactctctgcagtagtggagattggcacagaatgagaaaggggagttgagttctaggtgagatttgaggtcatcaccacacttctatttctgtctttaatcaaatatatcctaaaatttacgttgctctctttacagagagaaggaacaggaatgtgttttcctgcttttatcaggatataagatgtacgcagcctttgattctaatatattatatatataggtttaacagccagtcctgattcactgtgaggtgacatatactgacaccttgtggcaaaccacaatttttttttcataaagggcatctcctgcattccccccactccccacccacacacagtgagttctacatgtaagctgcaaatctgttacctacttgaatttaccttattggtacacagggacttagggaaggtgacatgggtaccagcccttggacaagagtgagaatctttgcaaattttaatgtggtgcagagagagagggggcaagcatattacatggtcactagcctccatttgccctcctacaacactgctgagatgctcatacctgttcaacttcccacttaggaatgaaaaggatagtaaaagagtcccatagttgcacattgtaacttactgtgtggactgtgcgtgatgaatgtgcccaaagtgtcccccaaagaagggcaattttatttgtctttctatattggcatttttgcattgagttgagaaacttttgatgtaattttgagtgacttttggtataattttcaagaacaataatgtgcttcactggactcctaggtcttaaatttccaggatgtgtttgggtgactgtaaaagaaatttcatgaactgtttcaacgtcagtgctccaaagattgatggactctctttgagtggtgcctttgggaagtgctggggaatggggacagccatgttcttctgggttcagagtttcctctctgagctgcatccttttcagggttggcacctggtaccaacccaagaagtagggcaaagctttcaagtgtaagattttgcatccagcatttcaaacaacttctttccttcagcaattacattgtagaaatctaggaaaccattgtgcaattggctttctaggagagctacttacacaaagccatctctggaatttttattagtaatttttacattgggtaaacagctagattcaatgacgtccaaggtcatgtcttactctgaggttttattatttattaaaccaaaccattggttaacctgtaaaagtataagtttctgctcttcttcagggatggcttgctgttatgcactaaatctagaaagaagaatttcaaggtaaatctggcttggggaaaattattttcccttgcattttactttcactttaggagagtaattttaaatttttcgatggtaccatcacatcaaatcctattatttctagaagcttctactactgccagtttctgtgatgaatatccatgtttgtaatttataatgatgtagcatcttcagaaactgcaagaaaggtagaggggcaatgcagaaagtaattatgtgaaagcaatgctgtaaaaacaagaccaagcaagggaattcctgggtaaacaatggcagctgtgagaaagttgtcctcatttttattcagaagatattctagaccttttgttacaggaattgtgcaaagtagttaccaaagaagctgtaagaacttagtgactctttttttttattattatactttaagttctagggtacatgtggacaacgtgcaggcttgttacatatgtacacatgtgccatgttggtttgctgcacccattaactcgtcatttacattaggtatatctcctaatgctatccctcccctctccccccaccccacgacaggccccggtgtgtgatgttccccttcctgtgtccaagtgttctcattgttcaattcctacctatgagtgagaacatgcagtgtttggtttttaaatgtgagcctactcctctccttgttttgtaccactgtccaggactctggcttcactaaatggggtcctgcagaaggtgttcgatgcaagaagtcgaatacctctagggccttctgtggtggtgatgagccttgatgactattgttttcattcacatcttcttttgttctagagtcagagtcaaagggaaagagctgtccagtattttatttttattgtaatgacagcctttttgcaaggcagcattctagcttttctgagtagtcactctgtctagctgagactgtggcacctggaagaatctgggaggatctggcaggttgggtgcagccaaaggtgtccaggagtgatccccacaagaagtgagtgtcagctacagagatcgtcacggtgactttcactcactcactcactcactcactcacttactcatcattcacttgctcactccccatatagtcaacatttatcaagctccttctgaggcctcagacaacaggatatgcactgggggaataagatctccaagatcaggcatttgccattctggagcccatatactagttagagagatggattataattagacaaagtaataccttctgaaatgtatttcacagaaaactagcagcatgagatgctcttcttggatattcttaaaccacttagcacagtgcatggtatacagtaggtgtccaactagtgtggatggaataagtggatgaatttttaaaactttgagaaatcctgtagtaaataaattacttctctaactttgtattttacaattattttatatttaaagaaaaactgcaagaagaatacaaggaaatactaaataccctttatgtactttaccaactgttaatgttttgccacatttgctttattattctctctttctcactctggacacacacacagatacacatgtatgtattataagtacgtaaataattctatatattaatgtacataattaatataaatgaatatatagtataagatagatttctgaaccttttgacagtaagtttcagacatcatgttcctttagctcttatcctaagaataaatatattctttttttttttttttttcctgagacagggtttcactgtgtcgcccaggctggagtgcagtggcgcgatctcggctcactgcaaccttgccgcctgggttcaagcaattgtctgcctcagcctcctgagtagctgggattacaggcgcccaccaccgtgcctggctaagtttttgtatttttagtagagttggggttctaccatcttggccaggctgatgttgaactcctgacctgtgatccacccacctcggcctcccaaagtgctggtattacaggcgtgagccaccgcgcctggccagaataaatatattcttacaaaactgtagtccatttatagaaatcaagaaacttagctttggtgtaatactataaactttatgcaaatgtattccaattttcccaatactggcatttataactccccaaccccagcccggaatccaagattacgccttgcagttggttgccatgtctttagtctcctctaatctagaacagctcctcagctttcctttcatgacattggtgtttctgaaaagaacaggccagtttttttttagaatgttcctcacattgaattgtattatgctttcttgtaattagattcagagtctgcatttggggggcaggaataccacagaagtaatgtgtttttctcactgcattctgtcattatgtttgtttttttaacgtcagtttttgggtcttttttgtgatgcgaactttggtgacttggctaaggtgttatccaccacgtttcttcactgtaaggtaacttttctttacctttataattaatagaggctatgtgagaagataatttggaatgatacaaattcttgttcatcaaattttcacccactaatttgagtatccattgatattctttttttaaataatttttattgtggtaaaatacataaaatttaccatcttaatcatttttatgtgtacagttcagtggtattacatacattcataatattgggcaaccatcatcaccgtccacctccataacttctttcatcttttaagacaaactctataaatttactaaataataactccctattctacctttctcccagtccctggaaaccatcattttttctgtctctatgaatttgactaaactacctcacttaaggggaatcatacagtatgtctttttgtgactggcttatttcatttagcataatgttcacctatgttgtagcatatgtcaaaaattccttcctttctcaggttgaataatattccattgtatggatgtatcacattttgcttatccattcatctattgatggacattttggttgctttcacagtttggctactgtgaataacgttgtcatgaactcaggtgtataaatatctgagaccctgacttcaattattttgggtataaatccagaagtggaattgctggatcatatgctggttctatttttacttttttgtggaactgtcctacttatttttccacagtggctgtatcattttgcattcccatcaacagtggacaggtgttccagtttctccacgtccttgcaaacagttattttctgtttatttgtttgttcgttgatcatagctatcctaatgggtatgaggtgaaatctcattatagttctgattagtgatgttcagcatcttttcatttatttgctggccatttgtagatctttggagaaatgtctattcaagtcctttgcccatttttgaattgggttttatagttgttgagttttaggagttctgtattacacttgatctcatagtcactgatggctcattgcaacatttacataaaaaccagaagaaaagagaagaaggggagatggaaagacctttaatttttaatttttgggggtacatagtagatctacatatttatggggtacatgagatactttgatataggcatgcaatgtgtaataattacatgatagaaaatgtggtattcatctcctcaagcatttatcctttgtgttacaaatgatctaattatacttttttagttatttttaaatgtacagttaaattattattgactgtagttattctgttgtgttatccaacactaggtctttttcattctttctatttttttgtacctattagccatccctactttcctcttaccccctactaccctttccagcctctgataccatccttctactctatctccatgagttcaattgttttgatttttagctcccacaaatcagtgagaacatgtgaagtttgtctttctgtacctgacttatttcacttaacgtaatgacctccagctccatccatccatgttgttgcaaatgacaggatctcgttcttttttatggctaaatagcactccagtgtgtatgtgtaccacattttctttatccattcatctgttcacggacgcttaggttgcttccaaatgttggctgttgtgaataatgctgcaaaaaacataggagtgcaggtatctgttttatatactgacttcctttcttttgtgtatatacccagcagtgggattgctggatcatatggtagctccattcttaatttttgggggaaacttcaaactgttctccatagtggctgtactaatttccattgatgattcttaactggatcaattgtgttgattacaagatggccaatcatatttattagatgacattcttctgccaggaagagcttttccatatcttccatttgtttgtttgttgactctatttggactcataggttttaattgtatttaatgtattatagcccattatggctgttatttcttttgatgctcaagttttaccagagcaatctgcttaacccaacatttccttaactcacttccctacaaaatgtttttcctttgggatacccattggtatcctgttgagagtgttcaatggagtgcaccatggtaatcctgctgtcacaccttgagagtggcacagtcattctctatagcaatccacttgtggctggagtgataaggaaagcctttatgaagaaattgtttgaagtcttctgataagtcaaaatgcaggtggaagaggaatggcatagtcaaaggcacaggaattagaagatataaaatgtatttttagtgcactaagatgaccagcttggcagggaagtagaagggagaaaggctgaaaatgaagattgggaatatattgaaaagggccttgaaagacagcctaaggaacttggatgttaccttgaatatgtgggtggtcatgaaaagcactgagcagggaactgatgtgatgtgataaaagcagaactgcagtacgggagaaatgaacaatgtggtggtaagctaagaggctcttaatgttgtctacaagaaaggtgataaagattgctattttgtgcatttatgattacttctatgatttgtaaccaggatattgaataagctggactcatggggtgtaatcacataagaaaattaatttcatctactttcctttaaactttattcaaaggacaaattctggcagtttcatgaactttttattactcttagtcaataaaaaatcttatggttatttttaagttgccaaacagtctcaattcaggacggcggggtgaggatagcaagaaagctctcctttaattggtactattgtaagatggcttccggctttctgagccttttaggtgtttggagctgacctttcattcttcttgtgatggctttcaaggatcttcaagggccaccacagggaatatttgcatgcatgtctcatgatatgagtgatgcacttttctcaggctgctgttctccatcagcctccagtttggggaagtccactccacacagtctctctttattgaatgctctatcctgtattttgggaaatgatttaaagacctccaagccagctctttttatctcatgaatggcttgcattacatccataggcgacacttccacatcctctgctctaccaagctccgggagtgtataccaaccccagcacagccacctctccaacttaagtttaatgaggagtttaaacttgtcattgtcggtattaatttcttgttaagcctatctcttcccctatgctgcaaaggtggcatgttagatttttatgtagcacaaagcaagctccctcactaagtttgaggtgggaggcaaatattcctccccttctcctttaggaaggtgtgggtagtatagttccctccaacgaaaaccttatcatgaattctttctctttattatcccaataatatacacccttttaagctttggtaatgtgtgaagagtactgaaatcggtttttgtagatttcctttgacaattcacagtgggaactgacatcgcactttctagaccactttttccaccttattgaacctagtgatggatctttggtttgagatttctctttcatttctgacatgtattagtgttgactaatacgcatcacatgccaacactctgctctgagcacaggccaacagaatggccttccacagtcacatgcaggatctgagattgtatactcaaagaggcaaagtccgagatctgcatgccatgctctcagatgcccctgaaattcacaggtgtgatctagcagttgaaatgagatgacaggttttatttgaaggggatttggccttggtcgagccagcgtggaaggtgcaatgcctgcatgttctgtggtgggtcccaaggtgagcattgaggtacaattttagaatttaaggatttgagtatatacattgtctggctgtagtttataggttcattcttatggagttgccataaaaataccttagttttcatgatctatttagcacattgtattaggccattcatgcattgctataaagaaacacctgaggctgggtaattataagaaaagagatttagttggctcacagttctgcaggctgtacaagcatgacaccagcatgtgcttggcttctggggaggcctccaggagtttttactcatggcagaaggcaaagtgggagcaggcacatcacatggccagtaagagcaagagagagagagaagggggtgatgccacatacttttaaatatctcgtgacaactaattcacaactaaggggatggcactaagccattcatgagaaatctgcccccatgatcatattgcttcccactaggccccaccttcaacactggggattacaattaaacatgagatttagaggggcagagtgcaaactatatcacacttcctactaactctacaaattattgagtgagacactgaaggaagaaattaattgcagaaagatgactaagtatacctatgatatatttttctttcatttattttaataggtggtggagaaaaatgcagatccagagacaacccttttggcctacctgagaagaaagtgtatcctgactttggagtgggagtgacggagaaggggggcaatggtgactgattctgtaggccttacattgtttcctagtgactggtggggtggccttgaggtgtggaggaaagagcactggattaggacttgggacacttgcattttagttgcacctgtaatctgaaattctcagctactgaatgagaggattgtttgtggtgatcttcgaggtgtctccccgctaagactctagtaatgccaaggtttaatccagggcctgtagaaaggtcctcattagccttggtgagcttcatggtcattcctctgtgggaagaggggggccttccttaggtgacatttgcttaatacataaatggagttcctggggaatgtttccagctctgcctaggtggagggaagcaagggaacatgtgtctattgggaaaaggatgcgtgaggtaagaatcctatacaggtagcattcattgtagaaacagcaaacagggagccctggagggtggggggactccttagaaagactggggtgctgctcttcactcagtgtgggtggggcttctggaaaagcccctttacctttagttctgagtatcggaagtattctgggaccctggaactaaaacgataataataattggagttaatatttaatgagcacttcctatatacaggcaggattcaaagtgatttgtgcagctcacctcaatctccacaggaatcccatggaagcgtaacactcccttttcacagaggaggaactgaggccttgatatgtgaagtgacctgccttttgctagtgtgttctggggaaatagtgatggagattgcaccaaagcctagagctgtgttcccaacctctcacccgcactggcaactctccagggggcctgtgagcaggactgtgctcatcctgacctctgtcaacaaaaccctccttctcctagcgggggtgtctagtgggtctttccagtgacatatttggggacagcaaagattattataacacgcacagaagtgagactggagcccatgctttcactctggtttgctcccctcctatcagacagtacagtggttggctttggtgtactttgttctggattttttaccttaagtgggtgtatctggaggttcacagaagataaacctggtggtgctggggagtgaaagtgtcactagatcggatcaggtgattgcatggaactccatttacagcccatctacctgggaggtctgggaagagaagctcattctcagagattattgagatcaattttagctttctaataataaaacaaattttaattttttaatcatttccattgtagttttgaaggcccagaagcctcagaaattccttatcagcaattggctgtgtcacatcttaaatgaaatgcaaaactgaaagttggcacataagtaggatgaccttgcagcttatggctatctgtgctgagagtcaatttatgggagttccagatgggggagaaaactccagccttgacttttacactagcttccagaaaggtctccaggctggaagaagaccttgctagactttgtactgccaccattcatcttcaggtgccaccattcgtcttcaggtgcccccaaagttgtttgacctgctgagagctgcatatatcctgactaggacacagaaaaccttcccaggtgtgctggggaggaaggagcgtgatgaagggagctcacccagtctggagtccgatggctgtgatggggccacaccggcagggtaacgtgttcctgtgtcatcttgtgtggcccacgttacctcttgggtctcagtttgttgttttttttaaatctgtgaggaagtttctttcctacctgctaaccaaatcattctggaggtcaaacaggtatctaggtgaaagtgcttttcaaaaataagatgttatatcattgtttttaaattttgtcttgaaaatgagagaagtgaccaggcgattatatcctcagttccctccatcttcagtaggtagtgggtggcttagaggcctgcaggtctgagggagaagcagccatgtgactcagggaaagtgacctccacaatagctgttctctagaatagcttaccagttaggcacttttaaaactcaaagtagcagatggtctttctgcaagtatatgtaagagtgaggcccaatattggacccagacctaaaaaaaccactctattttaatttccattcacatatcttttggaccaaatattcaaaagcctctggtctagccctaattttgattcttggggacttatcagcccaaaaagttcagagtgaaaagcaaggactcagaggtcccagaacagatcaatgtctcattctggcccaagtggcttcatggtgtgcccagctgggagtgatgtgagaactgccccgtatgctcaggtgtatgatttacctgctcacacatagaagacctcaacccaagagaaggctctaggactgaccagtcctagaactcatgtcccaagagatgctacttgggtgctgtccatggggttctgatgcctttgctcttctgtgcagtggagatggccgtgttccctgcctccctagggtgcagtgcagcccctctgaataaggaggccagtgggcctgctgccttccttggttgaggggcctgagcacgtgtgggaatgaatggctctgcccacagctctgcccaggcatttcctagcaacccagcagactcctctccctgagttcattctccttaactcttgaccacccagtggggctgagtggaaccaagctcggctgtggagaggggggctgcggggcttgcacagtgatgctctccaagtatgatcgtctgcagaacaagatcgtgtatcctttgcctgctggctgaccacccacatgggggctgcgatgcaggaccagcttgtgagggagtgcatgagtgtatgtgtgtatgtgcatgtgcgcatgtgtgagcccctgtttttatggagaatctgtgcacaggaaaactgtagaatgatctcttagcaagtatcttctaggcttataatattgaccaggctccgaactgctgataaaatgacttttctaaaatccacatttatatcacattccataaagcccttcaatagctcttcattgcccccaggacaaaatctctttgcttagcgggcaaggccctgcacagtatgccccaggtttcttctccagttttctttctcaccatgggcccagcactccattcaagcagagataattgtgaaataccaatgacacaggcccactaattgcttggtctttgtttaagctgggaagttctcctaggatttctctatctgactaactcttactagctctttacaactgggcaaaaatatcaccccctccaggaagccatcctggatctctcaagactgggttaggtgccccttgactgtgctggtcccatagtgccctgtgcacagcattcccaatgtaaactcaggcatgatacaatttttacagtttatttgagaaaacaacagttcatgagctcaagcagctccacattagaagcagttcaggagctccaccagggaaatgcaagcaggaggtttttgtaggatggacacaggcaaaaagcaaagaaattatttgattggttacaattatacaattgccttacttggtctatcccactggaaagtccctagtactatagttataagtttgttgactacttctgattggttgatcgtaaggcttttttttaatataaagatattcgtaagaagtagctcaagttaagactctgctgcaaatcaagcacagtttaggtcacttgtgaggcctaactggtttcctctgctgagtcttcaggcctggtctcctttttaatttactttaacaagatttaaattgcaccttcatatggactttggttttctcagttgactgcagtctgttgaagggcagagctttcatcttattcatctttattttcccagccctcagcagagtgcctgacttatgtctggcactcaataactgatgctgaatgtaagtgaatgagtgatgaataacagaagaatgcaaggaagttctagctaagggcttgctgtctcatgttgcctgggggtttcctccccctttccccacagagaaatgaaagcaatagaggcgaggaaatgcagggaagcaaagtgattggaagctaaggaacagccctgcaggcaggagcatgctttaaggctgcagcctgccagagaaatttcctcttgactcagcctcctgggtcaggctgagtaagaggtgactgaaagtgaccctggctccgttgctcctgctcagaggctgaggatgctctgatgcctgatcccacagtactctggaggggctcagctttacctataaggagagcttcctttgttcctttcccagagtcttcagtggagaggtgaggacactggtagaagagacaagaacataaatgggagcggagagacgtaacataaagcctcacaaagtcctccagagctcacagtcaggcccattctgatgatctgagtggacaataaatggaatgaccttaatctggggttctagccacttttctgccaatgcctgcctggcccccatctgctccttgcaccatgttgcagtgacaactgtggaaggaataggaagcaccaagacgaggctgcatcctgtgcaggtaaacagaggaaagggagctgtgctcttgagatcaggctctttcctctgcagggaggctcatgccaaagttgcagacttgctttgggttgttgggaagagtttcactgcttaatctaagaaggcatttcaccctggccacctccccatctcctctgggtaccgtgaggtgaaaagaagaaacacccaagcctgaagctccttcctgtgagctggttggttataacattgcatgatctgaagggacccaagaggccaactgaatctggtggctagaccagtccagaacttggaggaagggatgcagaagagcttcctcactttgttctggagtgtgtttaggaaactcccagccttcccagatttgaattttaattatctgtgccccttgtttataagcccacttactccctgcaatggtaattctgcaccccttacctcccacccgcagatagtacaaatgtaaactgctaggcctcctctttcattagactggaggttagcaagtgctaaataagatgacagagatttagtgcctgagcaaggctttctccttgatggtatcagaccacctgaaaatgcattgaaatccgaaacatttctggggcaaatgggcagtaataatcttagactggtttggggagacaatcaggatgctgttaggctgagtggaaagaaaggggagtagagccctgttggaaggaacggccattgtccccaaagcattttgtttgaggaaacttggggtctttgggagatcgagactatcctggctaacatggtgaaaccccatctctactaaaaataccaaaaaattagccaggcggagtggcgggcgcctgtagtcccagatactcaggaggctgaggcaggagaatggcgtgaacctgggagatggagcttgcagtgagccgagatcgtgccactggactccagcctgggcgacagagtgagactccatctcaaaaaaaaaaaaaaaaaaaagaagttaccagagcttggcccaggtcttaatcctcccttgattatttgaggagacatgtcattcaggcgatggagctggagcctcctgcggagaggctggtactattccttggagtggcatcttgggccagtcatgtgaggccagccaggtcggggtgggattgcttcccatctatagatttgtttcttaggcaggaagaggggaaattactaaacttgtccaacctgaaggagacgtgagagggttaattaaggcttgttattttctttgaaacaaacagatgaaagaaagaataaacagtttaaacataggagtcaagtattagtctattctcacactgctgataaagacataaccaagactgggtaatttacaaagaaagagaagtttaatggattcagttccacatggctggggaggcctcacaatcatggcagaaggtgaaaagcacatcttacatggtggcagacaagagaaatgagagctaagtgaaaacagaaacccttcagatttcgtcagatttattcactaccatgagaacaggatgggggaaccacccccatgattcagttatctcccacagggtccctctcgcaacacatgggaattatgggggctacaattcaagatgagattggggtgaggacacagccaaaccaaattaggttgtatctgtataatcaacctaaaatcctccctatccaatggtacaggttcttattcctaatcaacttattttggctacaaataggcttcagagccagattccacttcttgtccatttatttgttttctcttggtttctgtgacactgtggttctggcttttccttctctccccacacttgctcctcctctgctcagtctctaattgctgcagtgccctgagccctgacctgggcccctccccttcttcatccctatactctcatttacaacttcagctttgacctcccctcagaagttacatttccaattgcctatttgacatctcaatacggatgtctaatctcaaacttaagaaaaccctactcttttcctaatggcttccttccccagtcttctcccatctgagtcaatggcaaagccatccacccaattgctcaagacaaaaatctagacatcacctttgactgtttctgtcatatgccacacccaatccattcagaagctgccttctggttatgatagtcactgttctttgaagggaccttcctagtcatagctaacactggctgactgcctgctatatgcaggtacagtgttaagggttttacatgaatatctcagttaatcctcatcgcagctctagaggtaactacaaggatggtcctcatcatacagatgaagaacctagactcagagggcttggaaactggccaaggtcacagttggtaaatggtggcactggggcttgactctgtgcagtgattactacccccactatctctcaacatgtgctggctccagtcgagtcctttggggagcctgggagggttctgccatcccaggtgtctatgtcatctgtatcttttaggagagaattgccaaaagccacggctcccagtgcgggttctgcacccctggcatcgtcatgagtatgtacacactgctccggaatcagcccgagcccaccatggaggagattgagaatgccttccaaggtatgggccttcaggcacagcctaggaggtggaatggcaaacgaggccctgcagaggtcagggcaagtgccagggtgagaagcatgagggactaccctttggaggaagggctcaggccccccaacaaggtggtgactaagatctgctagaaagccaaccctctcttacttgggagaactcctggttggtgtggagacctcctggggtctcctgcctttgtgtccatatttctgaggtgtctgtctgccttccaccagtattggagtggggttggcagtgcatggctggtgcaggaagacgtcatttagaaaactccacgggggctagtgatatgatttccttccctctcagttttcaccagaacaggattctgcagggccaagaccaccaatgtgtctgcttctctgaattgaatagagaagcctccccatctattcaccatttccatcatttattcagttattttagtcacatcctatgccacagggataaaagacacaccctctactctcaaaaagttcatactctgaagaggagagtttgtaatgtagtctgataggctaactgatgaagctgtgatcagccactgtgggagcacttaggagaggtacctgactcagtctgggcattctaggaaggcttccattctaggaaagacttcctgaaatcatgataacttttctgaagtcaggatatgagaaggccaagaggccttccagacagaggtaacagaatatgcagcctggtaaagagagcacccaacttagttgcaagcaaagtcacaaactcctcacccatcccagggccctgcactgacattgcagttttttccttggcccacaggaaatctgtgccgctgcacaggctacagacccatcctccagggcttccggacctttgccagggtaagtggggaccccagaacatcagtgtctctgcttctaaaatggcaacactcagaaatcactgtggggagggagaccaagggcctctggtctacaaacaatgatgataagatgaccagttagtgagtcttccctctggggacatctggcatggggagtagagtctgccattcttattcagggaagggttcttatgaatagcatgggactttctgccagtgatggtctggagaccggcttcctggaagaggctcaccgcctgagagtgcctttgagcttggcagtgcctttgggcttggcagctttcccttggagactggcaggctcagcccatggcacaggtgctgaatgtagcatttaataacaacgtggccttgctcagcacttgcacccctcctccttccctctcctggctgctttctgtggctggcactctgttgggcttatgaaactggtaattagatctccagacagtttgtgaacccctgcaatgttcatataactctgagtgagaagtcacagccggatgtgtgggcattgattatataaacacatacacacacctgccatctggcaaggaaggcagagagctggcatctcctttcttggcttaatctccccccaggttttacttgacttctcaattgggccacgttaatcctgactccaaatcaaaccatctcatttcagtttgattctgggtccaggggagttacagactcctgtgctttccactcacctttagggttggagcatcatgaaaaagagtgctgtgtctgtataatcgtataatccaagaaggggtgggtaaacaaggagacaggaccttataaggatggaaaacaccacactctgattaatgctgctgctgatgaagaattaacaagtgtggaattaaatgaaaatgcctaaaagcacaaattcagattctgcagacctgggttcaatttgaggcacttaattgatgcacgaccttgggcaagtctccttgtttctattaggttggtgcaaaagtaactgtggttttgccattaaaagtatgggaaaaactgtaattatttttgcaccaacctaataaaatggtgattttattaggtgatttcattagaatatctaccttactgtgtttataaaaattaagtacttcttgaaaagcttttagaacaatgcctggcacatttctgttattcaataaatgggaactataaattatgaagctggtatatttcttccagtagcctctatataatcttcccaagttactcactgtttcctgagacccagagattgttaatcttgcctctatttacttcataagaacctgctcaaagtgatataatgtaatcagtcctcttaatttttcaaaagagaaggatttttgagtatagcagttgccttccctcctggaagttgaaatcgctcttgatttcaccatgcagaacttacctccctcaattcagctaccctgcagtgcagagcagagcaagactgagagctctgagcagccaaaatgcctgacacacaaaaggtgctcagaagctaatgcatgttactcatcggaggtctccgagatgtttcttcagagcctttttacttttattttacacacagctctaacaaactcggttactagctttcctgtccacagcacacactagaaagcgtgtggagggtcaactagaggtgggcacactgctcacggcgagaagtgaccacagctatctggtgacaaggaaagaaatggaggaaccattaaacaggtacaagcaagacttccagtttctggtctggcatgtaagcagcttaggagtctttatttcatctaaacaagaagaaaaaggctgaacaaactgaagaatcaacagttgtttttagatccatcagaggaatgaggtcacaggacaactcattgtccaaaaaattggagagacagacaggcagacacggcatatcagagcagaaacctctgcaggaacctttgccaggataggaagatgtaaggactaactgatgaattgctggagtttatacatggatataaactccagggggatgcagtcatggagcgggtgctctacacctttgtgagttttacctccaggatctccaccaggtcctcacagtaaatgttggagaaaaatctccttgtgtttctggtagggagtgggaaaaatgaaccattttggaatatgccagagcattctgttcttcttaaaaaggcctgtcctcagaagaaattattttaccgcagcctaaacttctgaggttatattagatcctcgcctaccttggggaggggaaatacgcaaccccaggacctttagtctttcacctgtgggaagggaaatacacaagcccagccccctccagccatcctgtcccaccaaacggagaaaaaaaaccctgagaagcgcttgtgaagttcacaggtgagcggcacaagctcaccaaaaaactgagactaatcctaggactataggatacttctccttcatatcttaccaatacattaactaaaggcctatttatatgaggtcttttcagccagtacatcatgtccacctttcaaccaaaaattataaggcatagtcaaaggcaaacacaatttgaagagactgaacaaacagcagaaccagagtcaaataggacaggaatattggaattaacaaatgaggaattttataaagctatgattagtatgctaagagatttaatggaaaaaatagataacatacaaaaacagatggataatgtaagcagagaacggaaattctaagaattaaaaagaaatgctagagattgaaaacgcttataacaaattgaagactaccttcggtgggctcattagtagactggacatggctgagaaaagaatctctgagcttgaggatatgacaatgcaaactttcaaaaccaaaaaacagagaaaaggaagtgaatgaaaacaaacagaaacaaataagaactgtgtgataactacaaaagatgtaacatatgtgtaacgagaatatcagcagtaaaagaagaaaaagagaaaggaaaagaagcaatatttgaaacaaaaatgactgagaatttcccaaaattaatgtcagattttaaaccacagagtcaggaaattcagagaacacaaaccaggataagtaccaaaacccaaaaccaaacaaaaactataccaaggcatgtgatattcaaacttcaaaaaatcaaaggtaaagaaaaatgacttgaaagaagccaaaggaaaacacccctcacctatagaagagcaaatataaaattatatctgacttttcccagaaaccatgcaagcaagaggcatggagagaaatacttaaagtattgaaagaaaaaaccaaagcacctaaaattctgtaacctccgtaagtatccttcaaaagcgagtgagaaatattttctcaaacaaaacttgagataatttgttgccagtagacccatcttgtaagaaatattaaaagaagttctttaaagagaaggaaaatgatgtaggccagaaactcagatctacataaaggaagagcatgagagaatgaacaagtaaaggtaaaataaaaatttttatttttcttaatcttaattggtctaacagatagcaatttgttcaagacaatcatagcaaccatgcatttgtttatgtgtgcatatgtatatatatatgtgcttgtgtataagtaaaatgaatgacaacaatgataaaataaacaagagggaaaaattagaaatattttgttattataagatacaatcactacctgtaaagcggtgtagtgttatttaaaagtggacttggattagttaaaaatgtatactgcaaactctagggcaactaccagaaaaaaaaaaaaagaaaaaaggaagtataattgatactttatgaaaggaaaggagatgaaattatatataatgctcagttcaaaccacaaaagtcagaaaatgagtgaaagacaaaactagaaacaaagaataaggacgacaaatagaaaacaataacaaatatggtagatactaatccaactatatcaatgattaccttaaatgtcagtgatctaaatacaccatttaaaagacagagattgttagagtagatgaaaataacaagacccaactatatgttgtctacaagaaacctactttaaatgaaaagacacagatagattaaaactaagtagataaagaaaggtggaccatgatatactaatcgaaagaaagtggaagtagcatattaattttggacagagcaaacagttatcagagaaaaagaggggcattaaaaataataaaggaatcaatactccaagaagatataacagtccttaatgtgtgtgcacctaacaacagagcttcaaaatacatgaggcaaatctggtggaactgcagagacaaatagatgaatccattattatatgtgaagacttcaacacccttatatcagaaatggacagcaccaggccaaaaatcagtaaggacatagttggactcaacggcaccatcaattaattggatataattgacatttatagactactttagccaacaacagcagaaaagacatttttctcaagctcacgtggagcattcacctagatggaccacattctgtgctatgaaacacacatttacaaatttaaattgcatgaatagagatcatacaatgtctgctttcaaaccaaaatgaaattaaactagatatcgataacagaaagatagctggaaaacccccaaatgcttgaagattaaacaacacaattcaaaagaacacatggtcaaaaagaaaatctcaagggaaattttaaaatattttgaattaaatgaaattgaaaatacagcttatcaaaatttgcaagatgcagtgaaaacaatgcttagagggaaatttatagtattgaatgcatatattagaaaggaagattaaaaatcaataatccaccaggcacgacggctcatgcctgtaatcccagcactttgggaggatgaggcgggcggatcacgaggtcaggagttcaagaccagcctgaccaacatggtgaaaccctgtttctactaaaaatacaaaaattagccaggcatggtggcacacacctgtaatcccagctactcaggaggctgaagcaggagaatcacttgaacccaggaagtggaggttgcagtgagccaagattgcgccattgcactccagcctgggtgacagagtgagactccatttcaaataaataaataaataaataaataataaaaataaaatacaaataaaatcagcaatctgggctcccactttagaaaactagaaaaaaaaaggcaaattaaattcaaagtaagctgaagaaaaataaaatttggagcaaaaatcaatttcattgaaaacagacaatcaatagagaaaatcaacataactgaaatttgggtccttaaaaagatcaatgaaattaataagcctctggccaggctaactaagaaaaaaaagagaagatccaagttactaatatcaaaataaaaagatctcactatagagctcatgtacattaaatggataatgaaggaatattaagaacaactctatgctcatatacttgataacctagatgaaataaaacaattccttgaaagatgtaagctaccaaaactcatacaaaaagtagataatctgaataggcctataactattgaagaaattgaatcattaattaataacctttaacacagaaagcaccaggcccagatagattcactggtaaatcctatcaaacatttaaaaaagaaattatgtcaattctccacaatctcttccagaagatagaatcagaggcaatacaaaagttaatcactttcatatgtaacagcaatgtataagtggaacttgaaattcaaaacacattatcatttacgttttacattaatactctccaacaaatgtaatacttaggtatgaatctaaaaagtgtgtacaagatttatgtgagaaaaactacaaaactctgatgaacaaaatcaaagaactaaacaaatggagagatatttctttttcatgaataaggagactgaatatgtcaagatgtcagttgttcccaactgtagactcaatgcaatcccaatcaaaatcccagtaaattattttgtggctatcaacaaattgatcctaaggtttatatggagaagaacaagatccagaatagccaactcaatattgaaggagaatagagaacaaagtcagaggactgacactacccaatttcaagatttactacaaagctgcagttatcaagacagtgtagtatggacactgtccatactacaaaaagaatggacaaaagaatggacaaagagatcaatggaacagaatagagagcccagaaatagaccaacataaatacagtcaactgatgtttcacaaagaagaaaaggcgatacgatggagcaaagattgtctttttaataaatggtgctgcaacagttggacattcacatacaaaaaaaaatgaatctaaacacagaccttatacacttctcaaaattaactcaaaatgaatcataaacctaagtgtaaagcaataaaactcctagaagatgacataggagaaaacctagatgaccttggaatgatgatgactttttagatgcaacaccaaaggcatgatccataaaagaaataattataagctggacttcattaaaatttaataacgatgaatgaggagacaagcggtacactgggagaaaaatatttgcaaaagacacatcttgtaaagtacttatccaaatatacaaagaacttataaaactcagcaataagacaatgaacaactaaattaaaaaatgggtaaaagacctgcacagctacctcaccaaagaaggtatatggatggccagtaagcatataagttcgacatcatatgccattagggaattgcaaattgaaagaacagtgaaataccaccacaggtctattagaatggtcaaatccaaaacactgacaacatcagattctggtgaggatgtggggcaacaggaactctcattcattgctggtgagaatgcaaactgcacaaccactgtggaagacaatttggcagtttcttacaaaactgaacatgtcttatcatgcacctcagtgatcacacaccttggaactgactcaaaggaatttaaaacttattgccacatgaaaacctgcacaggcatgcttacaacaaccttactcataattgccaaaacttagatgcaaccaagatgtccttcagtaggtgaataaactgtagaacatccaaataatggaatgttaattcagtgccaaaatgaaaggagctatcaagctatgaaaagacatagacaaaccttaattgctactactaagtgaaagaaatcaatctttagaagctacatattgtatgatatctattctatgaaattctagaaaagacaaaaccatggaggcagtaaaaagactagtggttgccagtgattaggggaaacagagggatgaatagtcagggtacagaggttttttagggcagtataactctttctgtaagatatcataagggtcaacacctgtaatcatgcatttgtcaaaaccaatggaatgtacaacaccaagagtgaaccttcatgtaaattaatggactttgggtgataatgatgtgtcaatgtgggtccatcagttgtaacaaatatgccacttttgaggatactgaagtgagaaaggttgtgcgtgtatgttgggataggggtatttgggaattctctacatcttccactcagttttttctgtgaaccttaaaccactctaaaaaaaaaacttttttttttaaaggcaccagtgcagaagccttagcctatttagtaaagtaggaatctcaggagggtggggatgagaaaatgtagtcttatccaacctcaatagaccttgagggcagtgatgcattactgtacatcacagtaatttatgtcattaacacaccaatgaattatcaagaaaatagatctaagtaataatgcactggcactttgtctggaaaaggcgcttctgtgaaatatgtccttcctcagagggccaggtgagtgggatgcaggactttcacttcaggtaggccagggcatttccctacatcactccttctccaagaagaaaggtgagaaaaggcactaagaaacctctctttcttcctttctttctttctaaatatagaggggaagtgcaaggtggctggctggggggaggctcagaatggacggagcaggtctggtgtccagtgctggagctgtgaatgcaggaagagtctgcacacggagcagcgtgtccaggtggtggggtgggtggggtgtttctctcctgatgccactgcctgcctgcttacaacttctccaaggtcacacctccagcatcccatgagtgctttcttgcagaagacaacgagttgtgaaacagactctggaaaatgccagcatggcatggtgtctcctgtggctgacttgcagaaggactgctcccagcctgctttttcaggaattgactacccgataaaagtgcctgaggcagaacctatgagtttcccctactttttcatctcagcacaactccaggactctgtcttctgaagccctgagctgcagatcagtcagctgagtgcgcccctctgccaccctgcagtgcctcggtgctgggtggtagtgattctagactctgtgtgtgctctgccactggtatcctaagaggtcctgagcaagtcttttcccagagatgctgggtggtctgacctgcatacttctccagaacaggcccacagtgaggagtgaagggtgtttacctttctgggaagaagtgcctaataagcagtagggaggccattgggcacactggctggacacagtgctgggctcagcacccgtcttggacatcctttggcagggtcctgcagagagcccagcctgggagacaccagccacgcccctagaaccttgctgatctggaagtcaagcctcttgagtcttgagagagccaatgggaatatccctcatagacgcttcctgaggaagcagcactgaagaagagaaatgggcataagggataggttttgataaagtaggacctagcttttatggagaaaagttcctgaaattcagtggccttgttgctcctatttgtttatccatgagttgtttaatctacgttagccaagcaagagggaatgtagcggaggcctccactctgggcaacaggcaggcaggatgcccctgctgttgatgctgggacaggcgtcagagctggagtgttctggatattagtaatctagattccttagcttctgcaaatactctttgtaaatacccttgtgcagatgttcatcatctctctaggatggtggatgctgtggaggagatgggaataatccaaattgctgcatgaaccagaagaaagaccactcagtaagtgagttcttctccccctggaagcctgggggtaatctgagacttagaggagtcagtgcacgagctccatgtccctggcggtgggggctggaagaggaacctacggtgagtcggtgatggcagactgtggggatggtgatggtgcacgttagccccgggtcctgtaactgagactctctcattcctgcctcccagggattacctgctcctcttgcagcctgcagggggctgggaatgagcttgctggaaggaaaggctgaattggtcctcttgggtgtttgaaaggaggagatactgcatcacctacctgttctctttccccataggtcagcctctcgccatctttattcaaaccagaggagttcacgcccctggatccaacccaggagcccatttttcccccagagttgctggtaggtgatgcctcagggacagatccagccgggtctgtactgtgagtccctggaaacctgctttattttcatacccactgggaactttgtgtctttcttgtcctttatgtttcagcttaaatttcccttccattttctgacactcccctaggttgagtctctgctatgtgtacccacagcccctgcacttcagttcatgtgtgtcacagttacagttattaatttgatgtctgtgttccttgctaaatgacaagccccatgaggatagggactggctctctaggcacactgtgtagtgtagcaggttcactataaccatttgttgatctcctgcctatatctaatacataagcactccaagaaacgtattccctctataagcaatccatttatttaaaacaaaacaaaacaaaacaaaaaacgagagctctcttcaaaggacatgatctgcagctcacagctctgtcttaaggaaaccccctcacacccactttatcaccatcactctaatatttatggcaacgaaagaatcaagccactcggagtttttgaagtgcacacttctcagagttttgagctatgaaaactaccttgtagcttcaacaggccagagagaatggctttgcagcaggccaccagcagatctttctctggactgtgaaactttgaaaatactggcagttcgatttgagggcttcgttctcagcccagtgtcttcctgcaagcactaaagccagccttcctaggcatccccttataacaaactccttccttccttccttccttccttccttccttccttccttccttccttccttcctttcttccctccctccctccctccctctctccctccctccctccctctctccctccctccctcccttctcatgccttgtccatggtgccccctggagatattatggggcactgcaaggaatctggctttcagccaggtctgttggggacccctcatggcaggtgaccttcagcaggtcccataacctccttgaccctcaggatcttctttcactggtgaaaatgaggctcataatgcctccttcatggaagtcttgtaaagactagtcccaatggagttcctgcctctgaacatattacttccccttgcttcttcctgttagatattttcattctgaatgtcagtaaaacatcccattgaggacttaaagcaatttataagaggaatgacagtaggaagagggagacattgtagtaagaaaactgcatttcccagaggctgaaagacactcctcggaagcagctgcgatttgaaggggagcgtgtgacgtggatacaggcctcaaccctcaaggagctgctggacctcaaggctcagcaccctgacgccaagctggtcgtggggaacacggagattggtaagggccagggaggctgccctggggctgccagggggtctgggggtgtttctaggtcctcttgcccatcctcacctccccctgactttacttgcctctgcaccctatccctctgccccactgactacctggagcccactggaaatccctggacactccagttcctgcaaaggcccctagctgtggagtcccacaggcctggctcagccccttgctggatgtgtgacctcagaaaagttgcttgtcctcatctaccctcattttctgttttttatatggggatactaacaactccttgaaggattgttttgggtgtgaaatgagatccttgcatgtagttgacttctctccacaaacatttacagagcaccgagcatgagccaggtactctggaaggggcttgggatacaaagctcaattggacatggttccttgccttcaagggccttctagtctaagggaggaggaactaatttaagcaaagtgtctaggccagtggctgatggacactagaggttccataaatgtcgcttttgaccccaccaccccactttttctgggggaggatgtgataaggtaaagaagaggagagctccaggtgtgactgtgtttgtgttgcctatgaccatggccacctgccctgtcagtgctaccacctaggacgtgaggcctggaatagttgaacaggctgggagactcagaatatgcacctctcagccccagtgctgtaagagatggggagaggttcccaggtccctgctaatctctgtcgatttctaaacctggcatggcctatttctactttgctggatcccaagcctagtgaggatctaaggaggagaccgtgggacagctgaggacctctgctgtggaggggcatgctctccttctaagcagtcaggtcctggctctggttcctgaaggagctgccaagccctgagttctggttggctcctcagccacagagaggagagcctggcttgggtcagtgctgatggagtcagaatggacgcctccctcgtgcgcacatatacataagatagagtccccaactgtggttttgtgacacactgaggcagcagggtgggctgagacacacctcaagaaatgtgatcttgatggccatggctcaacaggactcatggctcatgtagctcaggtgtagcttgatttaaggtggctgggggaatcttaggaggtccttctttttttttcctcaaagacagggtctcactctgttgcccaggctgaaatacagtggtgcaatgtcaccatagctcacctcaaactcatgggctcatgtggtcccccaccccagcctcaaggggatcatttcacacttgcatgctccctgccatgagccatccaatgtcctgggcccagttggattccaagagaaatgaataacaaagattacctaagttccacaattagaaatgatttctcaagaccatttccttctgcgccactcccttctctcttatacataccccaatagcatagtcacctccagtcaacgcagagtgttgggggaaggcagacaaagagaaaaccttagtaacgtagaacttgctgcttcaatctgtgttctttgtcctggaagctgatattcaaaaggggctggtattcaggtgcttctaggatttctgaagggagctttgaagattctggaatctggggatccacaaagcctagggcccccttcagaaatcctaaacagcacctggggggaagggggggcaaagaggtcacaggtatttcttttttaaccttttccatctatacactgttggcagggctgggagaggtgctgagccaactgggtctaaggaacagaggcacacttgtttaacagaggcttctgactcatttagtcaggaaggccagaaaccacacacagatgtgtggccccgcaaagccagacaacttgaagaactcaggcagatagtgggaactggaggacagatttgaagttttccctcccattttccttttttgttttaatgttaaactttcatgtttttattacgattataccccaacacgaataatcattccagtactgaaatttggttattcttagctgtgtgatttgggcaagaaacttaacttttctgtgcctcagcttcttcatctataaacagaaaaatcatagtacctcatagggttgttgtgagcattaattaagttaaaatagggaaagtgcttagaagggttcctgacataccttaatttcctgtgttttctaatgtacacaaacacacacacacacacacacacacacacacacacactagagtgaattcaaactcatttcatttgaattcaggtaggttttttgagagggaaagaaagacctagttttgggctgacagtccaaagactgcatctaatcccacccctggtctactgagtttcctattcccagacacctacagtcaccagagagcatattatgattgtggatatgtcatatatcctgtgtgtaatggtgagaaaagctgctaaggcctgccctggtgatacaacaatgggcctacaacttcagcttcttgtttctctctaggcattgagatgaagttcaagaatatgctgtttcctatgattgtctgcccagcctggatccctgagctgaattcggtagaacatggacccgacggtaagaggaggttcactccaagcttatggaggggctgtgaggctggggataggttacaaggtgggtggcaggtatcagggtggtctccccactggctctggctgccccctgcttctcctggggctcaccttgcacagggaaaggcgggaggagaccccattcattgctgaaacatccatggtagggtgccagtgggcaagaggctgcgggatcttcaatcatttttctcaattctggctacacattagaatcactcatgcgggggtggggaggtggggattgtgcctgagtgcttttaaaaagaatgctaggacttcaccttcagagattctgattttaatgagttgagaactactggtttagaggaaagagcattggttgtaggatcaagaggcccaagcttgagtactggctcttttattagctgtgtggcattggttaggtcactcaaccactctgggccctcatttcctcatccatggaaagctgtgagtcctgattcagccttgctccagttgctggaaagcttcagaggagctgtgcatgaaagcctcttctgaactgtgggaagaattgctgtgattccgaacgtgcgttcccaggtatctcctttggagctgcttgccccctgagcattgtggaaaaaaccctggtggatgctgttgctaagcttcctgcccaaaagacagaggtgttcagaggggtcctggagcagctgcgctggtttgctgggaagcaagtcaagtctgtggcggtgagtcgctctcagaagcaagcgaggcccgtaggatggagctttcatctgaaagcagggcagccagactctcactgtgtcagtgcagtgggcctcaaactttagcgcttagagttgcctgggaggagcagtgcttgttaaagtgcagattcctgggccccaccctcagagattctgatacatgggtctgggatgtagcccagctcttcaggtgcttctgatgaaggtggtctgtggggcaccctgggaaatgcactccacgactcataggcttcattctgtggttgcagagatgaggcttcctgcctccctcccccttcctgagcttggctgagccaaacagtaggtgaacaagagatatggatatgctagggagaagtcagaattgagaggggaatttcctttcagagctatagggagaaccagagacagagccctcccacagagggaggaatacacctgttgattattcagtcagccttcagacaagtccccacattcccagtttgcaaatggtggcattcgaacaccctatgccaatggaagctcttcacaacagtttatggtgtcggaagaaaagctatctcttccatttttaaattgtttttttaaattaaaacaaaacagcctactcctattcctcccagcccccaccccaagtacctgtcacttctgattatagataaggaaacataaactgtagataaggaaacataaactcaaaaactctgctgagttccctagttctgctaaaatctatttccaggaagaattgtattttcatcgtgcaactgattttcttcctgttttctaataacgagaaccctgtatctgattcttcttacattttttttgccaagttaccaggaagttcagatccaaatagagcaaattgttcaaccttaagtcttcctcctctctttccttgatctttatcttctattttactaagtctatatggcctctgtgataaatcacctcaatcctttcgggaaaaggttgggtgaaatcatcaatcaaacacacacacttaaaggggcttgcctgctaaaattttagagtggggatccaatctcaagtattctgatttcaaattttgcgcatttttcagaatgccgaagttctcactatgctggtattgtgactacagtaggcacaggacctcaggggtttgcctgcagcaggtgtcacctggctggtatgttcaggagcctgctacgtgagcaggggtttcctggggtgggctctcactgcatgctctctgcttgttttagtccgttggagggaacatcatcactgccagccccatctccgacctcaaccccgtgttcatggccagtggggccaagctgacacttgtgtccagaggtgagctgcctgaagcagaggtccaggaagaaggacttgggggagaaaagtctcaccagataggtcattttctggagaaacagagctcaaagttcagtgacccagctttccctgtgatttggatccagggaagcatggagaatgtacctggtttggtggacgggaaagctggatattttctctgtagagaattcacagcaggaactgctacctgcatgccttacctagtggggtactggggctgggatgcactggctcaccacagcctgctgttggatcttcaggaattctgtgaaccatttgtgaaacacagttattaataaaaatcaggccaagtgcggtagtgcggtggcttatgcctgtaatcccagcactttgagaggctgaggcaggaggattacttgaggtcaggagttcaagaccagcctggccaacatggtgaaaccccatgtctactaaaaacactaaaattagctgggtgtggtggtgtgtgcctttagtcccagttccttgagaggctgagtcaagagaatcacttgaacctgggaagcggaggttgcagtgagccgagatctcaccactgcactccagcctgggtgacagagtgagaccctgtctcaaaaaataaaaataaaaataaaattgtataaaattacaatgaaataaattatattcaaaacaaaaggaataaatactcaaaattcatcacttcgtaagtacttcattttgctgttatcagtgctcctggagttatttgcatctgttctgtctgtacggtggaaatgctctacaattatgtgctccagtgcatctctgccttgtcagagggtccccaagaccaccccggctctgatattcactgagaggattcagcatgccgtcatattcctggctatgacttattatagcaggaggatgcaaaatcagcaaagggaaaagatacatgggagcaaagtctggaggaaccaggtccaatcttccagagacttctcccagtggagccacacagtgcatgcttaattcctccagcaataagttgtgacaacacaagtgatgccttgcctaccaggaaagcttgttagaggctcagcgacagaggttttcttgggagctcatcacataggcagcctctactagcatgtgcctaaagtctggactcccagaaggaaagcaggggttcagcataaactattgattgtacagataatttaggcgcagtgagctgctccatcatggagcactgggaacccttctgaagtacaagttcccaagggccagccttgtaagcaacccctacagaggacagcagtccgggttgctgtgctaactctttcctgccttcttcccagcttcacattcagtgatgcaactttggtggcctggaagtatttacaccacagaaattggcaaatgctataaaccagggcttttccccctacacggaactggttgttaaagattcaccagcacaccattgcttaaggatgcttaaggatttcagagagaggatttggccccaattgtgccagtcatttgctctgactgtgggcattggagaccagcatgaagaatcccactgatggttatcctttctccccatggggggttcccagcctttccctcactttggctcctcttcatcttgcttctgtacaggcaccaggagaactgtccagatggaccacaccttcttccctggctacagaaagaccctgctgagcccggaggagatactgctctccatagagatcccctacagcagggaggtgagatgttggaagtggttccaggctctgctcaaataagtcctattgccaggctctagacaaagagatcagaatctgcttcagggaccaacctgagcatctctcaacctttacattgatgatttttctctctgaactttgcctctgttgaaccaaccatactcctttctggacaatgagaagttgcaggataggagtccacatggcatggactgtggaaccagatagctagaaacttggtcctgagtgagccatttcacctttctgagccccaattcccttatctgtaaaatgggcaccatgtcacttactatacgggttattgtgaggactgaaaataaacaattcataaggttcctggtgatgcctagaagccagtggagatgaccagcagctaagaacagaattccaagaacacatctagctgtcgaggattcctgcccatgtcagaggaaatttgctttcccgtggtaaagaatgtggggttcatgtgctgcatgaagaagctgcctgtggctcagaccctcatacgctgaccttaggcttgacgaggtgttgcttcactgacctcgctgtggattggtgcggatggattcctgcttcatgagtggctcttctggcctgttggggcaggtctgggcaccactggctgccttcctctttgttccctgggccctgtgatgtcttgacctggtgtgggtctttcctcccttagcagctaccagctcagaacacatccaaaagggcctgtcagaaaaggcatctgggagaggcttggggagccactgtcagagagagtgtgaaggtttcccacagctggagctttagtgagtgttctaaggcatgttttgcccttggtaattttgacctccttaatgagaatgctaattaaattagagcatttatatccctgaggtggtttcttaatggttttctagcttgtctgtatagaccattttgagcagtgattcccagagttttgaatttcacagttcagtaaactttttttttttaattatgagtgatgaaagtggggaggaaacaggtgtagctctattcagtttttatttgccaggtatggtcattaacaaaacacatccttccatgaaagaaaggagattttaatacccagaattagaaactctcaagaaagggtattgtcagcctgacactgacagttcactgtaccccagcgagaatgtccccgtggatgggcacagtcctgggagtgagcacctgggacctctgttccagaacaaaggtcaaactctgggctcagtgccccagagccacacatgacatgcaagctgagctagctttatcatcaggagcgggctccatggcttcttcagggaaaagtgggtggccatttgggggcctcaactgtgggcctcattgtgctttttccaatagatctcctctccctaaacctgctaattttggtgttcatcagaatttgtggtgccagagtgagtacagacctcaaaaggaacctgacacagaaagggcctgaagtcaggtggctctttcctggaaaatagctcatgctctcctcctatccttaaagaaagatcctggctcgaacccaggaaggaaaatgtgtttaaagcacaagggcagtgattgtttcatagtgtgatagtgatattttctttcttgcttgctttcttgctttgcttgcttgcttgcttccttccttccttccttccttccttccttccttccttccttccttccttccttccttccttccttcctttctttctttctttctttctttctttctttctttctttctttctttctttcttcctttctttctctttcttctctttttttttgagacagattctcactctgcctgctggcccaggctggagtgtggtggcatgatcacggctcagtgtggcctcaatgtcccaggctcaagtgatcctctcacttcaccctcccaagtagccgagaccacaggtgtgcaccaccacacctggctaatttttttttttttttgtagagatagggcctcactatgttgcctaggctggtcttgaacatttggttttaagtactcctcccacctaggcctctgggattacagacgtgagccactgtgcccgggttctttcaccaagatttctgaacgatgccaacagactggtgggagaggcaggttagagagggcactgtggaggccacaaacagaggatgccaaaggccaaacagcctcagtccccagagaggctgggtgggcactgatagtgggcaccagggtagggaaggtaagggggatgaggggtctctaaggagcctttgtgaaagcacccttcttcccctgcagctgttgttcaatggagaccacccagttctactttgtccctgaccctcagcttttctgactagcagggagaaatcctgttttttttttcagcttctgggaatgttatctggaacctctcctaaacaggtggtaatcagttacatttgatctttgattcccggggccagttcacccactgatgtgtgatggtgttatcccctcacctcacctcatagccctgtggtttgggtctgccatttgcagcccctacagagcaaggtggaaaacaggcaccttcctgatctcttttagggggagtatttctcagcattcaagcaggcctcccggagagaagatgacattgccaaggtaaccagtggcatgagagttttattcaagccaggaaccacagaggtacaggagctggccctttgctatggtggaatggccaacagaaccatctcagccctcaagaccactcagaggcagctttccaagtaagagctaacagcacaatgaaactgctgctaatgttgctgctactaatagtatcattgttactgctgctgctactatgactaccagtagtattactattgctgctactactaccataactactgctactgctgctactactgctaccacttctacttctactataaccacagttgctactactactattaccgatactactactagtattactactaggagtattgccactgctatgctattaccattgctgctactactattgttactattattgcaactataattaatattatgattgctactactccagctgcttctactaaaattactactgttactcattattgctattactatgactactgttgctactactatcactgcagctatgatcactgctgcaattcctactgtcactattatgattagtattattgctgttattactattactattgctaatactactgctgcctcttctaccgcttactctattagtactactactactattactgctgttatactagtattttactaataacattactgcttctaatattattgctactgaaattactactactactactgttactgctactactactactattactattgctactagtattgctgctgctactattactactaacagtagtattactgctgttattgatgctgctggtgctatgactgctactttttggcattgcttctgttactactattattactactgttgctgttgattctatgacaactgcttctatgactattactacttctactactactatctatcttgttaccactactgcaactattattgctgttgctagtattattactagtagtattgatgctgatgctactactactgctctgttattgctactattgctaccactatggctgtgattagtactactgctactactattactatttctatggttattatataacagaaattgtaccgaacacttcactaacattatcctaggaaatccttacagcacccacataggatcaataaagcttaacttggagtttggttccttggttccgaaattcctggctttgtcatttaccaaatagataacataagtcaagttacttaatctccgtgtgcctcagttttctcattggtaaatgggtgtaggaattttgcttactacattttcaaatttaaattaaaagtgagaattcatataaaacacttaagatgttgcctggcacattgtgaggacttgatagattttaactgttattattttggtggtcttttaaaattgtatctatttttgaagatgaggaaacaggctcaatgagattaattaaagttgcctaaagtcacccaactctaagtatccaagccaaattttgaaccaagctttgtacagctccgaggccctgggcacacagctctacacaaaggggtctggagggctgggcgggagcgctgtcccacgccctgctctctggcaggctctggaaggaggagctgctgcaggacgtgtgtgcaggactggcagaggagctgcatctgcctcccgatgcccctggtggcatggtggacttccggtgcaccctcaccctcagcttcttcttcaagttctacctgacagtccttcagaagctgggccaagagaacctggaagacgtgagtggggcctggccaggcacaggctctctgtagcatgtttggggatataagaagttggtctgggtagtaaatttgctcctctcctctggacatctgagggcagaatagcagggaccagggtcacagcacaagaatcttggaaatgggagtgaccagctggcttagaggcagagtgctgggctgggctttggcgacagaggttcttgccctgtaatctcagctacgtgggaagctgaggcaggagaatcacttgaactcgggaggtggaggttgcagtgagccaagatcatgccattgcactctagcctgggctacaagagcgaaactctgtctcaaaaaaaaaaaaaaaaaaagaaagaaagaaagaaagaaagaaagaaaggaaaaaaagaaagggaatgcagagtgtgatgagtatgtagggtggaatgggaatgtcaggtggggctgcaatagccaggaggccgtggaatccataggatatgtcttcaagagagagtgcaggctgaggtgggcccagctcctgagatttgttcaccaagaatttattttgcacctatcctatgccaggttgcatgaggtgctagggggcagctcagtgtcggggagaacatggacaataaaggccacacttgggagacaactgcagagatggagtgtggagggagcccaaagtggagaggatgtcactgatgcagggacagcagagataaatccttctttaagaaaagaactttaaaaatacaggattggataaagaaaacctaaaattactcttactctcaaatcccagagaaaaccactgccaagtattttggttatttcctctgattttttttcctgcatttatctgtccatctatctgtcatactgtttgtctgccccatctctctctctctctgtttctatctgtccttccatccatctatcaatatctgtcatcttcctatcttttgatgtggatatattattttctaaatagacttgggaccacactgcatatagcgctttaaatccccctttgcttccattgggattatattgtgaacattttccatatcattaaatgcttcccacagaattgaggagggcaaggaaggaggagaaggatactcccaacagagacagcagcaggcataaatgcaagaaggagggaaagagtttggggtgttggagaaagtacagaccattcagtctacagggtccactggggggctagcagtgaagctgaggctgctcttaaattctgagctctcagagcccgtgtttggatgctgagagatccagccagcactcaaaggcgtatgaagtgaagagacaaggggatcagttatcagtttggtcatttttatggacaagcaaggaaggaatcagtgattgaaatataatcctggtcacctctgttttcttgtctccacagaagtgtggtaaactggaccccactttcgccagtgcaactttactgtttcagaaagaccccccagccgatgtccagctcttccaagtgagtacggtcagtgtatggctaatatcaggggactttgcaggccacatgagttggctagtggctgaccatcggctaatgactaacttgaattgtatataggtccataaaactccttactcttgtgcgtaaatacccagtgaagaaaatgggaatcgtatagatgttaatgtcactatttctcccttgtttgcctaaatttctctctttgggattaaactcttagctgcccctcttccttacagattttttttttttacgtgatggataatgtacaaagccagacgtcttcttgagtatgctaaaacaaacaaacaaacaaacaaacaaacaaacaaaccatctatctgctccagctttttgagaggtgctacgtaaagggtcagcaaacttttcctgaaaacattttagattttgtgggccagatggtttctattgcaacttctcaactctgtcattgtagcacaaaagcagccacaggaaaaacaggaatgaatgagtgtgttgccttccaataaaactttatttacaaaaacaggcagtgggcttgtgttggcccccatgccacaatttactgccccctgcacactagagtgtagtcgtcccaggcatgaactctggaacctgactgcctgaatttgtgtccacactctgccatttcctaattgtgcaaccttgaacaacttacttattcccttgtgtgcctcttaagcaagttaattatacccacctgcaaatgtggataatcacatacctgtttcataagatggttttgaggattaaatgtgttaataaaagtaaattgcttagatggtccctgggatatggtgaaacactcaataaacattagccattgttatgattactttgtaaaacaaaaacagaactttattatgagatcaataatttaaaacattttagaaaatacagaaaagcataaagaagaaaataaaaatcaccaaaaattccacctccgagagcaaattattattatatttttgtttaattcttttcattatttcctatgtgtatatggacatgtatatactatatttatagcatatattatcttttcctacataattgaattattgtcaaacacaaacacaaatgttttgcgtcacgtttttatgcttgcatgaacaatccttctaattaaagttcttcaaaagtatgttttaatggttgcatactattgtgttatatggggctgcataatttatttacccaatccccaattagtggaaatgtaggttcttctttttcttgttgttcttttatataacaacactaggaccacccttgctatcacttatgcaccttcctgttccctttgccccacgcccctctgaattctttattcttaccccttggtgtcctttgccatgtagcatgaagctcaccagtgtcccctgggcccatagaggggcagtgtccttggcagctcaccctgattgatgaccctgtcattccaggaggtgcccaagggtcagtctgaggaggacatggtgggccggcccctgccccacctggcagcggacatgcaggcctctggtgaggccgtgtactgtgacgacattcctcgctacgagaatgagctgtctctccggctggtcaccagcacccgggcccacgccaagatcaagtgagtgacaccgccaggaggagctggtggaatgctgtgagggggccactgggagtacccaggagacttctctcaccctgctaggccatggagatgcaaagataatgaggtgcctccaggacctcccaggctagagagaggggaagaccttataggcaggtcctattattatctctctgttccagatgaggaaactaaggcacaagcagggtatgttacttgccccaggccacacagttggtaagtggcagagttggaatttgaagccaagcaacgtgagcaactgtgttgtgctgcctcaggatgttcaagccagagagtgtgaacttcacttcctggtgggcgttagacacataccctgctgagcagatcagctaggaaaagcccttccttgggcccactgtgtggactaggaatcaggtttccttgtcattggtcttttctctgctgctgctcctagtttggagacgggatccctccaggaatggtgaaccaggcacagctgaaatctaacagataaataaacttgtccaggtccctgaaaacaaaaaaaaaagtgtttaagttcccatggttggcagctataggatacattctttcccttttgttccttgtcttgagcccatattgacaataccataacccacattgtctacgctcaaaccacctccatccaagcaatgtgtgaatggatggaagaggatgagggggttgacattgttgtaactgcaacagttggggccttcctgggctgcacacacttggaagtgggtttggcaggacagagcttaaccctcctaacttaacctcagttccaataatcccagtcacactgctttctggcttagtgactttggaaaaactacctaacttccttgagtctgagtttccccaaacataaaatgggaattaggataagtactttcagggtttcttgtgaggattaagcatttggaagatggttagaacttcagggcagtttacatacctttccctgaaatgtgttgccctatttccccatgggggcatgtgccagtgtgatgagtacatagttgagactgttatccttgatcatatagtcgggcattctccctttgcggttcgtgttgcctaattatggtaggatgccctgtcatgctgggatagcacaatgaatgtggggagacaaatccagctttatgaagctgttcagggccattggatcagtggcacagccgggctccatgtgctgattttgggagggagttaggtgtgatgtgtgcatgagccagagcgctccagagtaagtgctgttcgttctgatatggcttgcttgtacttggagaccagacagagcatcacgtaacatccaaagaggcctggcctgccttcttcactttatttatttttaaatggagacaggatcttgctatgttgcccaggctggtcttaaactcctgggctcaagtgatcctcccaccttgacctgccaaggtgctgggattataggcatgagccactgtgcctggctggcttattcactttatatccccagcaacattcagcatagtggcctgaacatggtgaggatttaatcaacatttgcagaataggatataattgaattagaatctaatagaaaagaagcagagaatcgaggaattaggatggagccaagccaatcaaaataagaacagggttgtccaaccaggtgatgggtcccctgctccagcttgctgacctggcccctcacaccactcattcttgcaggtccatagatacatcagaagctaagaaggttccagggtttgtttgtttcatttccgctgatgatgttcctgggagtaacataactggaatttgtaatgatgagacagtctttgcgaaggataaggtaagtcttggatttttttatatgaagtaaattgaataagtattgaagttttaatttgtgtacattgctccaaactcctgatctggaaaggttatacatttgcatggattatggccatcatccagttggcccatattcaggacaatccaaaaagatagaatatgttacttgtttatttaattgatggctgctgtttgtacatggcaggatgtctctatgccaaagtggcagtaaaacaacactggtgattgcatttgaactaacaattcggttcttaagggacaacagtaagctctttaattaaaataaaataagaatacatttagtacactaactagaaatcacaataccaccactacgtgaattggtaattcacttacatgaaagtttatctattgatttcaactatgtggaattcttcaacaacaaacaaaatttttcaaatgtttaagacagctgctacaaaagtccttatattttactcataggatagttctcgacagtcattttgtaattccaatagacatccaatgttgcaaattagacatgagtgggtacttctgaagagtgaattcatcttattattgatgtaaaagtgaaggagataacaaaaaactaaaaatatgagaacaaagactccatgaggagagcatttcatagaagaacaaattgctttacatactttaagagcttctcagagcagtgctagcattatggctagtgaaagtcagccagatttaaccaccattgcaataaccaacagccagatttaaccaccattgcactaaccaactgagtcaatagcttatttgggccataagagataattatcagagacatgcatactaattgttggttcctattgtcagaaacttcatcttctaaagtgatgtgttgtacaaaaattttttgttgtttactttttcggggatgttggatgacaattatctctgaaggagatccattaagcttttatgaaactgaattattaaacaaaataaaacaacaatcattatcatataaatttttaaaaatatttttatgggtcatcaagtctaagaaccagtatttgagagctactgcttttgggtattagttgaagtataagacatgatacttaaagtatcatgtcttgtaagtacgtgtcttacaggccttatattgatgcttacagcctttacagcctttgagaagcttttggtataaatctgggaaatagaacataaaagagagtggtgaggtgaaaagaaaataaaactgggggtcagggcctaaggttagtcatgatctgtcaatagtaactagccaaatgtggccttgccttctgagtctccataggaagaccaatggtgttggagtgaatccgaattgacaaatgcacttcctggtgccatatccccctttctgctcatggcaaacaaggaatcaattgccacattctatctggttcagcttctcaatagtctgccagtactaaatactcagaattggcccttgagatgaaatgtgtttgccatcttgatcctagtgatcctcaatcagtaggataaggaaattaagaggccctagggcattcctaaagtgtgctttgattgtgagggcagggacttcttttggctttttgaacaatccaaaaataatttgtttcaccatgagcctggttgcgttctttaacagtctgtctctgctactaggttacttgtgttgggcatatcattggtgctgtggttgctgacaccccggaacacacacagagagctgcccaaggggtgaaaatcacctatgaagaactaccagccattatcacaattgaggtaactgagaatgggctgcctgtgtagaggagtgagctccccgtccctggatgtgcatgtattaggatcccctggaggggatttgagcagcaggtagggatttgactagatgggtttttaaatccctttcaaccctgggatttggggtcccatgaaaccttcccctttatgatcttatgcccagtccactaacaacagccaaactgagttcctccttctcaaaattttacctccatctggtccttgtggtattctttgcttttcctcaaggtccagggttgtccacctacagctgaggaaatggaggaatatgattctctgggctatagtagagcttacttcaagtctgtatgtgaagcatatagagattcatttatggaaagagagagtcaacaattcagagagcttctctttccctaatcagaacctatctttccctccctgctaaaagccacatttctgaaacttctttgtgatcctcaggatgctataaagaacaactccttttatggacctgagctgaagatcgagaaaggggacctaaagaaggggttttccgaagcagataatgttgtgtcaggtagagctgttccatgccgcagtgggaatggggtggccctggtttgcaaattaaattcaagagatatgcattgaaccctgaagcagggaagtgatttctggacatttcctgacagaagattccctcttacgtttgtagcaaaataggagacagttggatgggaaagagcttcagttatcttaatctctactctcctgtctctaggctggacctaatgattctagagagattctagagtattctgatccggaagaccaactagggatgataacagccacatatgcctgacagccttaggtctgccaggcctctaaccgcataaattctcatcctccccctacctgaaggcagtccttacccatcttcaactagcatcctccctcctcttccctttgccctgctctccctccacctctgtctctgacactgtgaaatcaaatccattgctcccaccccaggacaacacagctgactacctcttttggaactgttttttacattggctgttgtgctttgcaaagtcactatgaagccaactctccaacaagcctggtatgaagccgactctccaccaggcctggtagcttaggttcgggaacatgcgctggttttcagtgtttcaatcacatctattaatccctgctttactttttccaaaattttacaatgatggtttttgaaatccttgatttccataagctgcagtgagaagagaactttggactggatgcatttcagtgtcgttctttctttgttgtgggggtggggatgaggctggagcactcagctcccagatagctaagactttgggatccttttccaccccaagtgggaaaccttgaggttacccctcaggtagccattgcttcctgcccagaccacttggcagagtatactctctccttaggcaagctggccccttctgcagcattgggctcactgtgagggatctcactgcttccccaggggagatatacatcggtggccaagagcacttctacctggagactcactgcaccattgctgttccaaaaggcgaggcaggggagatggagctctttgtgtctacacagaacaccatgaagacccaggtagatgccttttgggtcagctcaaggggctgtcagggtagcggggagctcctagcagaccaggagggccatgtgggaaataggaagagggagatgtgggctggtccagagggtactcgagtgtcatagtcctggagccagactctttcaccaacaagctggtatcactgaccttgttccataacctttctcagcctcagttttctcatttataaaatggggcctgggtgggttgtcataattattagatgagttttaatatttagactagagtttggtacatgttggcagttatcatttcagtgcctatggcctcggtcaagtcatatcctgcctcagtttcctcatatgtaaaatgaaggtgttggattaagtcatagccacagggaccactaaattatctacagcagctcaaatattctttgtttctctactgcctgtaatgtgacagcggttgccagtgttttcggcagctggtcctactctcatgatctaccagtcgctggtcacctggtcagacagaataagtttctaaaagtattctgtgaccaactgcttgccctctggttaaaaaccaatgctgaattcagtctggcaggccccagcatcactaaccacaaagctgcatgggattttcaatcaaggaatttcagaattcgcagcagtaattaggtccatgcatgttggacaggctctgccttaggcctgaaataagttcaggtaatgcattcagtgcgaatgttctgtctttcactcacagagctttgttgcaaaaatgttgggggttccagcaaaccggattgtggttcgagtgaagagaatgggaggaggctttggaggcaaggagacccggagcactgtggtgtccacggcagtggccctggctgcatataagtgagttccaaagcctgtttctcccatctggctctgggaagaagaataaggctgtctgtgccaggaaggttttcaggacttccccctgttagaattagtttccccctgctttgaattctcacagccctctgtttttagaacccttgggcatagtgggagggtaacatcgcctgttccgttgtggtctggcacaggtatccacctctgatctctcctactggctgtgagctctctaaatgaaagcacatacctcgcttccttatattctccaccttgtctatcacagtgcctagatggcaaagcagccctgtacaggtctgctcagcgtgcaggtggaaaagatggcttcccggctgtttttattctgagacttgcagggctgagctgctgttgaaggctcacaggcttctaacactgtcggtaacccccaggaccggccgccctgtgcgatgcatgctggaccgtgatgaggacatgctgataactggtggcagacatcccttcctggccagatacaaggttctagatgttggggctgtgctggggcgggatgagccattttgtgaggaaagctgggaccgaatgtccaggcatcctgagctgcactcctactttttgcctatctgtagaagttcaaataagatatagcaagaagagaaattcaaataggctaacagcaacacagaaaggtagtgctgagggaggctggcaccccatctcccaagggtggcattcgtgacttctgtggatttgctgtgttctgagtctggtcaggctcagaaacatgattcaccagcatactcagggtaaaccatcgcgcttggtagcccaacattaacatgatcacaggcctgatgtaaaaattggaatgacagcttagtaatttactgtgagaaataaaacttcccaggggcctggacaggcccaagatgttaggatgggtatgtacttttccagaccatggttggacacggtccacacttctctctgggacagtccctcttctgggtttctgtggatgaccaatgcaccctttccctgtacacatcagcaaagccttatggggctccgcctagctctagaaacctgagagccctctctccatgaattggccttgaacatggcctttgacctattctgagtttgtttcatgatttaactcccagcaagggattatatttctcttagccccaaattcttgtgggcctgaagaggattccttgatcttctggggtcccagtttccgtgtgtgtaaaacagcctgtaaagggtattttaacagtgtacataaggtcaaggatttgcgtgctcctgtgaaatgaaactttttgtgtcttctgaccaaaatctgtgaggagacagtccggtatctttcctagtttctcttccctgcgcttcccccccgccctatcgtgaccagccttctctttccaacctccttactcccctccgagaccagaagccaggtgccggtagcaggaggaagaggtgtggggacaagggcttccaggggtggggagccaagtgtgtgccactggggagaggtcagttcctctcttcttcacttgttaccttctggtgacttctgaaggtcacctttttttcacgggatgatgtggtgttctgtttatttcctccaggtgacataagtgggagggaggatcagagggagacagagaggtgggggaaacgggacttatgataaatccctctcctttctccttttatcaggttggcttcatgaagactgggacagttgtggctcttgaggtggaccacttcagcaatgtggggaacacccaggatctctctcagagtgtgagtaggacctgcagccgcccctgcacccagagctgacttcgaggtcagcctgttcccacgcaggcacaggcctccccagtccctgcttgctactgttgcagtagtctcctaatgggtccccaccttcaggtttcccatcctcgattaatctctatagcacaatgatgatcgtattatttctctggttaaaaacccatccttcctgttcaagataatttgccaagctagcaagttagttacaatgttttatgtatagtgtggtggcattgtgtgtgtgtacatatgcatggaatagtaatatatatatacagtaacatataaactaatactaatatatattactatatatagcatgcgtggaaaagtgtctgaaggaacatataccaaactgttagcagtgatgatcaaattgttaacaacgattggaatggtattgagaggcgtacacactgtcattttctgtgttacacatttctgtgatgttttaattttaaataattcgaattgctttttaaaaaatggtttcattgaagtataatttacataccataaagttaatccatttgaagtatataatttaatggttgttagtaaatttcaagagttgttagaccactgtcacaatccagtgtttgaactcccatcaccccagaatgatgtcttgcatcatttgtagtcattcccattaccattccataggcccaggtcatcattaatctactttccgtcttgtagtcaagtcattttatagaaccatacactatgtagttttttctgtttggtgtctttctctcagaataatgttttgtaggttcatctatgtttttattattattctttcttttgagatagagtctcactctgtcgccaggctggagtgcagtggcacgatcttggctcactgcaacctctgcctccagcttcaagcgattctcctgtctcagcctcccgagtagctgggattacaggcatgcacccctatgcctggctaatttttgtatttttagtagagacagggtttcaccatgttgatgaggctggtctcgaactcctgacttcaagtaatcagccctcctcagcctcccaaagtgctgggattacaggcgtgaaccactgcatccggcccatctatattatagcatgtatcactacgtcactcctgttcattgatgaataatattccatcatagggatataccatatgttgtttcccattcaccacttgatggacatttgtgttgtttccagttttttgcttttatgcataatactgctctgaacactctcatactagccttatgtagacatgtattttgatttctcttgactaaattcctaggaatagaattgctgaatctgtggtgagcttaacattttaagaaatgatcgcattttcatgggcggaggcggcccggcaggcactgggagagctgggctttattattactaatattctacaattgtttaaataaaaggaactttataatgaaacagtttggaatactggctcaagaacctatgtcaagatgagctgaattttagtaaattactttaggaattatgacgagctaattgaattaggcttgtgacaatgaggaatttacatgacaggtaaaactcatattaaaaatgtttagatatttgcttctatagatgtcactttaataaaataccaatttagttttacttgtggcttatctagttagtaagaactttaataggctttactgggacaagcttactgctcttgtaggagctcctctcacaagtagttgtaatgccatagagtgacactcaggatcagtagcttgagatgttatggtttttctcttcatctatgacttgcagagagcctcccctttttggatccagacatcttttctgaatcctggttccactagtacatctgctcccctgtgatcccaaatcatagtcaatggtgcctcgaacatagcaccttcagttaaaggctgcctagtgctctgaggaaagcttgctgattatcttcctgctctactcaccccaaaaggcagaaaagcaacatagtcagtcctgtgctcatttgtaattgtaaagatcagttatatatatatatatatttgtaatgagagcaagtatatactcattataggataaatttaaggagtttaaaatatcccaaagtagaatttctatatctagccttttgtttctttcatgaatatttgcaagcaattaccattaaattcacacatgaaagattaatctgaaagatcagagagaccgtattattcctgaccatgatagaactgcttctgtggtctgggacaagtaacaaagcatctgcttgagttttgtttgtaaaatacactattaatatttgacctacctcaaaacatattgaggatctgtgaaatgctaagtgtccaaaataaaatattgctgattgtctttttattgaaagtaaatttcctcattaagccaacctgccttctgtaagtcatagtgcttaaatctcaggatttttcattaggagagacctgtcattaaggatttgtaggtataattgcttagcctccattattggtgcttgggatagagaggttttagatttttctgttttttgttctgcttcaaagctcagtttattgaagacatttataagctattggatcatcacttgaatcaagattttgactagtgagcttaattgtccatttcttatgatttcaaagttacagtctgagaaatggctgattttaataactgtcctttcataaattaatgttggaataaactgaagctggagataaatacttcatgaaaactggctaaagtctgaaataattacctgttttatgtccaatagctactaaatttgatagaacagttttgagaaacatttcattcttgaaggcaacatctgacatggttctcagcaagttggaatagtaaagattgctgggctgttacgatgagtggaaggagcgtgtttgtagcatacaagttattcagcaatcttgtgctgttgacctaaaaatatgtcttaattcttcatcaaggcaagcctggtgaagtctttacttgttactacttcaacagttggaattagttgctctttttacttgatgaaacaaaactatacctctgaatatttatggatactttttactaaatcaggcttgtgttcttaatccaaattagtaaagttttatggaagctgaaatgtaacacagtagtctccccttatctgcaagagatacattccaagactcccagtggatgcctgaaacatcagatagtactgaactccttgttatacagtcatctccccttatctgcaggagatacattccaagaaccctagtggacacctgaaacctcagatagtactgaaccccttgttatacagtcatcttcccttatctgcaggaggagatacattccaagaaccctagtgggtgcctgaaacctcagatagtactgaaccctttatagactatgttttttcaatctgacaaccaaggcgggactaagcggctaaggggcaggtagtacacagtgtggataagcaggacaaagggaagattcacatcccgcacaggacagagcaggagatcatcagatttcatcactcaggacagcttgtgatttattttatttattttttgttttgagatggagtctcactctgtcacccaggctggagtgcagtggtgcagtcttggctcactgcaacctccgcctcctgggttcaagtgattctcctgcctcagcctcccaagtagctgggattacaagtgccctgccccaccacgcccagctaatttttgcatttttagtagagacggggtttcaccaggttggccaggctggtctcgaacttctgacctcgggtgatccacccgcctcatcctcccaaagtgctgggattataggcatgagccaccttgcccggccgacttgtgatttaaaacataaattgtttatttctggaattttccacataatatgtttggaccaaggcttccttggttaacaaactacggaaagtgaaattgcagataaagggggttactgctcctgtgctctaaaactggtgtttgggtgatcaggagcaggtagccaatgggaagagcacatctgagtgataactaaaggagtttctctggtggccttttcacattctccaatgctcaagcatattttccacttaccattttctctttcacctcattttgcctcaccatcccccatccctgcttatttcttaagcccattgatggcactcattaaattgtgtttagggctaatgaatcattgttccttaatatccttttcaatatgccacaatttaggacacatttaaaattttctaaaacaatatcctaatccgaatattgattaatttgagccacattcccaactctaactcagggcacactgccagtcttccccaatatctcctctcaattccccaccacaccttataaaattggaatcaaagaaatctcactctgtcattgtgaatctaagaataaaaacactgattttaatactgctttactagtttcagccttctaagtaggtaggcctctaggtattctgcagatcactggtggtcttgatagccattaatatatgtttgtattatgttattttttaactaaatcacagttggaaaaaaacatctttgatattatgcccttggacctgttactgcatcactggcgcttgtgatgcaataggacacttcgcctgtactaaaagggccaagagtaaatgccttgtttttttttttttggtttttgttttgttttgttaaacatgtctatagagttggcagttaatgctgaatttgtcaaacagcccttccaaaactattcttgtatttaaaaaataaatggatctacctaatttctattgattttttttaaaaaagaaatgatcaaattatattcctgagtgactacaccattttatattccaatcaacaatctttagggattccacatcctcagtaacacttggtattgtctgtctttacccactagaattagtgggtgtgaagtgatagctcattgtgatttcagtttgtgtttcttatatcctgtgaccttgcagaactcatttatgagttctaggatttcttctgtagattccttgggattttctctgcagacaatcattatcatctgcaaatagggatggtttttttcttcctttccaatctgcatgttttcatctccttttctttacatactgagatggctagccagaccttgcagaactataggtcatatatccttcctttgtttttattcttaaggggaagacatccagtctttcaccattaaatatgttattggtagggttttgtttgtttgtttgttttttgtagatactcatgatcagattaagaaagttttcttccattagtgttttctgagcatctttataatgaatgggtgttgaattttgtcaaatgctttttctgcactgactgatatgatcatgtgattttttcttctttagcttgttaatattgtggattgtattcattgatttttttaaacactgaaccaaccactgtccttggaatgaatccagcttggtcatggtataattaatatattgccaaattttatttgctaaaatttgttaaggatttttggatccatattcatgagaaatattgctctgtagttttttcttttaaaattataccatcttggtcagggtttggtgtcaggataacactagcttcataaaatgagttagaattcctcttctaattctagaacagattgtgtagaattggtgttaattcttctttaaatgtttggtagaattttccagtgaaatcgtttggacctggagacttcttttctgatagccttaaaactattgattaaattgcactgtggtctgatagacagtttgttataatttctgttcttttacatttgctgaggagtgctttacttccaactatgtggtcaattttggaataagtgtgatgtggtgctgagaagaatgtacattccgttgatttggggtgaagagttctgtagatgtctattacgtcagcttgatgcagagctgagttcaattcctggatatccttgttaactttctgtctcgttgatctgtcctagagcttaaaagtataatacttgaaaaaaaaagaaacaaacaaaaaaacactattgattaaatttccttaatagttctaggactattcaaattatctatctcatactgaagtggtagttttgtattttgagacattcatttaaaaatgttttgtttttcattattattggtacatagtagttgtatatatttataggatacatatgatgttttgatacaggcatacagtgtatcaggataaacaaatcagggtaacgtcaatatctatcacctcaagaatttatcatttttctgtgttagggaacatttcaattctactcttatttatttttaaatatacgataaattatcatatatttaaaaatattatagtcaccatattgttctactgtatgctagatgttactcattctaactatatttttatatgtattaaccatccccattttatcctctgtccccctaccctccccagcctctggtaaacatcattctactctttatctccatgaattcaatttaattttgtctaagttattaaaaaattcatgtgtgtagaatcgttcatagtgtgttcttatttctcttttgatgtcttcagggtctgtagtgatagcccgtgtttcaatcctgatttggtaatttgtggcttcactttgtttttctgtcttgccagaggtttgtcaattttattgctctttttaaagacccgggtttttgtttcattgattttctctattgtgtttgttttcaatttcactgatttctgctcttatccttattatttcgttcactctgtttgctttggatttattttgcttctctttttctaggttcttgagttgaaagcttaaattaactatctgagaatgttttcctcttttttaatgtattcaatttagtgctgtaaagtttcccctcagcactactttagacaggtcccataagttttggtatgttgtatttcatttttttcttgtatttttggtctgcttgtttatttccctgacaccttctctttgatccctaattatttagaagcatgctgtttggttttcaggtgtttatagatattccagttatctttgtatcctgaggctttctattgatttctagtttcattccgttttagttgaagaacacagtctataggatttcaattctttgaagtatgttgaggttcatatcatggcccaggacatggtctgttttgatacaagttccacgggcacctaagcagaatgtgtattttgctgttgatggctgtgtattagttttctgtggctgttataacaaatcaccacaaattgggtggcttaaaataacgaacatttattttctcacagttctgaggccagaagtctgaaatcaaggtgttggcaggaccgcacatcctctggaagctctagggaaggatccattcctgaccttttgtagtttctggtggctggtggcactccttgacttgtggttgcatcagtccaatctctgtctttgtcttcccatcaccttctcctgtgtgtccattcttgtctacctagacatacttctctcttacagagacatgtgattgcatttaggatccactccaatggttcaggataagctacttctctccagatccttaactttatcacatattttgccatataaggtagtatttacaggttccatgattagaaagtgaatatatctttggggaggcatttctttttcctaccacatgtataatgtgctataaatatccactagatcctgatggtggtgttgagttcttctatacccttcctgattttctgtctattttttgctaccaattttgagagaggagcattgaaatctccaactgtaattgtggagttttctatttctccttttagttctaccagtctttacttcatatctttttcagctcttttatttggggcagacacaattagtattgctgtcttttgggaggattgacacttttatcattatgtaatctccttctctctgtctctggtaattgtatttgctctgaagtctactttatctcatattaataaagccactcttgctttcttttgattaatgtttgcatgttatatctttttccatccttttactttcaacttgcctacattattatatttgaagtgattttcttgaagacagtatgtaattgggtcatgtttgtaaatccattctgctaatctcttttaactgtatttatacaatttatacatcatataatgattgatgtgttgaggcataagactgccactttattttttgttttctgtttgttctatcagcttttcatttctctgtattcttttgtgtgccttgctgtgggtgggttacttggacattttttttaatattccatttttattaaaagtatctcttacatagctttcttagtcattgttcaaggtattatgttatatatacacaacttatcacagcctactgaagttctcattttactagttttggtgaagtatagaaaacttacctccctttatgactctgccctttcccatttatattatttttattttaaatattttctttacattcatttagaaccacatcaagacagtgttttaatttttgtttcaactatcagacaattttaaaaactgagaagaaaagcttactgcttgtacccatgattttgcttatagtgtttttccttccttctaattttccaagcttccttcttttatcattttctttctgtttagaacttcctttagtcattattttattgtgggtctgctggggacacattttcttagttttccatctgagaatgtcttgatttttttccttgttcctgaaggatcactttactgggcattaagttttgagttaacagttcgtttctttcagcacctgaaaaactgccacttcgttctggtctctatggcttctgatgagaaatcctctgtcattctaattaggctccccctataggtaagttgtcatattctctgggtgctttcaagatttttcctttgtctttagttttcagaagtttaattatgataggacttaccatagatttcttcaggcttatcctgttttaagatcaccaagcatcttgaatctgtaggtttacatatcttgaaaccttgggaacttttcagttattattgctttgagtactttcatgctcttctctttttctccttttcttccagatctccaatggcatgagtgttaggtcttttgttatagtcccaaatgtccttgaaactgtaatttttttttcattccatattctcaatatagttcagactggataatatatcttattctattcttcagttcactgattctcttctatgtcccttctcttctgctgttgaatccacccaataagctatttattttggttgttgccttttcaattctgaaaggcccattaggttcttctttgtatcttctatgtctttggtgagactatctgtttatttccagaagctttttatttctgtcaagtgtgttcacaattgatctcagaggcatttttttcatggctgcattaaaactacagtcagataattttaacatctttgtcacctcagtgatggcatctcttggttatcttttattattcaggaagtttgagatcttcctatcacttggtatgacaagtgatttttcactgaaacttggagaaacccgtcattaatgtacagatgatggtggtgatgacgatgttctgagagcttggatctatttaagccttctattttaattggctccttctgaccttgctctagcagtggtggatgccacctcatcactgctaggtagaggtagaaatcttgatcttccacttggcctttgttgatacccaggttaggaacaactccttcttacttctgggcagagatgggagatctacattccacgtgttgtccatggacatcatggtgtgggtggcctctttaccactggcttgtgctaaaagccttgactcttcactagactttttctgacacaaccagaaaggaagggaagagtggtgtgtctttgttatgtgggtggggaagtcaatgtgttctccagtgactccatcataaggtgtaggtacagccttatgactggccatcagcaatgaaagtcttgactcccgatctggtctcctctggcaccatcccagcaggaatgttggggtatctcataacagcctcatgaatgtggaagtctgggctcctactgagcttttgcaggtgtgagtaggaatgagactacgttttctttttctgtgatgtttggctggggtacttattgtctaaaagtgtttagttttgctagactgcccttttcttggtcttttggctagagataaaaggatttggaatatatagtgagctttttggtctctgtcatcattggcatttctggattgccagctcctgccccaagtctgggatatatagatgaggcaaaaaggaaacccctggaactcaccatcatgtcattccttgggttgcaaagtccctactgggactgcctttttttttcctccacttttcagagtattcttacattgttgttgtggttgattttaaataaatatatagaattccagagtttttagtggtacttaatggaagtatggaagtgaaagtctctgtatatacttcaatgttgagtttctcacaagatagaatcctgagtaatgtgtcagtaattatcgtgtgcttttatatttagtctcagttgatgctcctccagtcacattgtaaatgaccagggtaagaccagaagtgggagctacgtactcctcattattgtggtcacagctttgggagatgaacttggaatattgagttgtttagaaaaataactagagggcttggatgaaataaagtcaattgtgagaattaacaaatttattttggtggtaccactttttacagttttttaaatcttaattttgtaaccatagtagttacgtatgtatagattcttgtttgaaaaaaaaaaaaaaagaggtggctgggtgcggtggctcatgcttataatcccagtactttgggaggccgagatagacagatcacttgaggtcaggagttcaagaccagcctggccaacatggcaaaagcctgtctctttgaaaaaaaaaaaaaaaggttaaagttttcaggaaaagccgacattcccctttacccttttggatcacactcctctctgctaggggctgcctaattggctcagttaggaaacttcacacttcagatctagggttaaaattgttcaaaaaaagaattattcttatttcttgttctcttcaagtataagacatgctttctggtatgggaaaaaatcacgttgaaaaacatacagtctttgtccctagacatcctacaagattttcaattcaatccagcaaatatattaagtgcctagggtggctacataaggaaggctatgacattgtttctgccctcaagaaattcacaatatggcaggggaagtagatgataaaagaaacagaaatacaagttgataaagtactagggaaagcaaaagtagaattaattgagacatagaaaaatcatttaggatgagtaagactgaaattatcaaagacacataaagcaacttgtgggagagagagagtacccatagggaaataaaccaaaaccaaaataaaacaaacaacaaaaaaagaaagctgccattgatctttccagagagatgagatattacaacttaaagaaggaacagaatgttactaaaatggagcagtcaaagaataaaaatgagctctcatgacttgacactatgaaagcagaggggttcaaagaaacttgacaaatctcccaaaaatggaaaacaatgtgaaaaaatagagaaaatacaaaaaaattttgaggatcagttcaagaggtccaaatcatagacatttcagaaagaaagaatggaaaaaacagagaaggggaagctatcaataattcaaaaaattttccaaaactgatgggcatacactttgggattaaaacagcccatataataaccagcacaatgaaagaaaatagacctatgccaggttataatgttatgaaatttagaaacctgaggacaaagagaagatttcacaattttcaggaagaaaaaacagaactctccaagaattggaaaggcattgattggacttctcaatagcaggaagctagaatgtactagtaaaatgccttcacattgctgagaaaaactggaaagcctacttccaaattaggattctatatacagctgaatcattaattaaaggtgaaagtagaataaagacatttcagacatgcaaggtgtcaaagatgttcctctttgtgtaccctttcttatgaagatattaaaggatgtactccaacaaaatgagggagtaaaatttaaaaagggaaaggcatggaatctaggaacaggggattcaatatggagagaggtgaagggaatccctgggatgaatccctttacccctttggatcccactgggggatttaagatttaaatccttaggtaacagctgaatagcagatctagtgggcagcgaatttaaattggagtaggccagatggctctaggatagaaaatctgatgtgcttgaacatgttggaagcagagctcaggagggaaaagagaaaatatattaggagcagatttttagaattggggaaaactttaagttggcttagtaataagtacatacaaaatgaagcagatgaaaaaataaagacaattattaactccagggtgaaaaaaatattatcaagagagaagaaattgtaatgtaactacatggttcagctgtaagtaatgtttacagagttataatattaaattgactgttgatctgatcaaaatacaactatactgggaaataggaagctggtaggggtgagggctggagggagggggctaagccaaaactaaattctccttttccataaaagaaagacaacctaaaagtctaaaactgaaaaagtcaagacatagcaatgtagccacattatctagagacgtataagtttatctaaatagctgatagatgataagctatgagaattgtaagtagttgcttctggagactagaaggaaggaaagtggaagaggctactgtttttcataccatgacttacagaagtatgggacacttcaaactatttgcagtacaactttcatggctgtttcatagttttcattaactaatttacaatgaatttttaaaagttaactgttttcaaaaagaggcaagtgattagttccaactagaggctctggaatgaatttctccacagagttgctgaatgaggggactagtgggtggataaggtgcagtaaagatgctgccgcaggctgggctcatgcctgtaatcccagcactttgggaggccaaggcgggcggatcacgaggtcaggagatcgagaccttccaggccaacatggtgaaaccccatctctactaaaaatacaaaaattagctgggcgtgtggtgcgtgcctgtaatcccagctactcaggaggctgaggcaggagaattgcttgaaccagggagtaggagtttgcagtgagccaagatcgctccactgcactccagcctggtgacagagcgagactccatctcaaaaaaaaaaaaaaaaaaaaaaaaaaagatgctgctgcaatatcctgggggagaaataacttgggtgcagaggggaaaggcaggcaatggatacagccctcaaagttcctactttgaggaaccaatgcaatcagtacactgttctctcccatttttgtttcctctgcttcagattatggaacgagctttattccacatggacaactgctataaaatccccaacatccggggcactgggcggctgtgcaaaaccaaccttccctccaacacggccttccggggctttggggggccccaggggatgctcattgccgagtgctggatgagtgaagttgcagtgacctgtgggatgcctgcagaggaggtaagctgagaatttggtagcacaagtcagagtgctttagactacttcgggggacagcggctttgtatcttgggcatctcccatgggggcagatgacaggcaggggctgctgagggggttggaagcttaactttaggttgtgccctgcccccacagtctcttgccgccaacaaggcctctgtgtctctctccttgggaaggtgcggagaaaaaacctgtacaaagaaggggacctgacacacttcaaccagaagcttgagggtttcaccttgcccagatgctgggaagaatgcctagcaagctctcagtatcatgctcggaagagtgaggttgacaagttcaacaagtaagcactaggagtagaagtccagttgctcttctgggtttcatatcctacagcctttctgctgaccccatataggaagctaataattcaatggataacttatgagactgctgagtttgccaactcattcacagccatctctttaagatcttataatgatcttcagcccggggcaggtgggctcacagcctgcaatcggtgtcatagcctgtcagttgtggttcatctttacgcgtttgtaaacctttgggcacaccgtatgataaagaacactggcctaggactaacacgtcacagttatgcacctgcctctgacactgatctataaatatgaatttgggagtccctgggcctcagtttcatcatgtgaaaagtgggcataattgggctggctctgtcttcctcacagagttactcagataattaaatataaagcacagagaaggctttattattgtcagtgaggcacagtgcctcctggagatgatgacagcccaagattaccagggcactctgacccagtacgggttgcactcagggaagaagagtgttgacaagaccccctggtgtgggctgtgcaccagctgactgttctcatctttgtgggcaaccccaaggatgtcctgttttgatgtgaacatccaaagatattcatgtcctcaatatgatagcgaaggttctataagaatattcctttttctctagggagaattgttggaaaaagagaggattgtgcataattcccaccaagtttggaataagctttacagttccttttctgaatcaggtaattgctttatagaattgtgtccatctccgctggactgggaccccatttccctgttgtttacagtattgcaagggaaatttcgttgtcactggtaacagggcttactggaggaactctttgctctttaaatgaaagtcgaacttgcacagtcctatttgtccagtaggtcatgggcagtgagactcagagatctgggatcaacctctagttcttacctttccttaactatcggactggagagagctactctatttttcttgttctgtttcttcacttacagagtgaggacagatatttgacctatttccctttgagaacaagagaaacagagagaaacatatgaaaaccttctgcaaactactgaagtgctatataattaaatcatgagattcatactgccataatttttgtctgaggtttacatccaaaatgctgctggttctcttgttcctgggctccatacctttggtcccaaaccttaatgagttggattttactgaattttgtgtctggcatccttctctttccctaggcaggagccctacttcatgtgtacacagatggctctgtgctgctgacccacggggggactgagatgggccaaggccttcataccaaaatggtccaggtgagcagccctctctggcagtgttgtgtccgttgttagaggaagtggtataagaaattgagcagtgggacctatcagagcagaagcaggcccggggtctggccctggccctgttgcttatgtccgtgtagcctcgggcaagtcttttcccccacttgaactcagtttcctcatctgtgcaaaggagttggccaggtgacctctgaggacattgctattaccaacattctcagtgtgtgaggcgggcatgctctgtgtgtaaaggtcgcgagtttcccacattccaagactcctcggagtggagtgaggacaatgagctggattagagtcagcacatctgcttggcgcatggagactggccagattggatcttttgaaaagtgagtgttagtgtaaaaaggcactgtttgtcagtttatgaattttttatccaaccgaactccaccaagtgctccttcaaattcagccagatgtaaggacatcccagacaatgagattagagtttacgaaattgttttcttgcctgtaacagtgaatgtgaatcctgtcttggggagaaggcagccaagccccatgataaccccttccctagagggcaatgtcttctcttttcgcaggtggccagtagagctctgaaaatccccacctctaagatttatatcagcgagacaagcactaacactgtgcccaacacctctcccacggctgcctctgtcagcgctgacctcaatggacaggccgtctatgtaaggagcccatgggatcccgcagagcagagggccagcccagagctgtgggcctggagagtctccctgggtgggagctagaagggttccttgcaggctctttggctctggccaggcctctggctcccttatccaggaggatgctgtttctccaaacctcaagctaaaagagaggcccaagaatcataatcactgccctcaaagctgggaaggatgagtgcaggatggggagatgaggataccgagggaaagcagaggcttctggaattactccctggtgctggagctagcaataggacaatgggctgaagctgaaatttgattatagaggcaggttggccacactggctcctctgccatatgggggatataatcaaacaagcagtttgagggaagaagacacctctctggggatccctcaaacatttcgccctctgtcagcctaagaattgagtcaggaagtgctctccaagcagggactagtggtggccctattggccaggtcctgtcgattctaccctgggccttgatcattctggagtgggtggccaggctgtttgagtggcaccctgggtacagcattgcttggaggtagccttgctggggccctcgggttttgcctgggctacagaatgcagaggactgatgtgtctggggtgtggggggtgtttactttaggcggcttgtcagaccatcttgaaaaggctggaaccctacaagaagaagaatcccagtggctcctgggaagactgggtaagtctgagctgatccaagtcacgtttgcaaaggagagggaaattgacagcagggcctccgttccgaatccgaacaagtaataggagacaatattttagtcagaacagcagagagaagttgaggtggtttgtgtgattttacaggatgaataaatgctcattctggctgggtccctttctctatagctttcatcattgagggaggtcatttgagggaagtttttgatccaggatcttgacagccttgtgggaatcagggttttctttgcctgagcctgagaggatgggtgcctgctgaacatgcctcatcggattgtcttgactcagtgggtctgctcccacaccccgcttgtcccagatgagcctggttttcctcaaatctccatctcttgagtctgagtctactgagattccctctgtgacagcgtggggagaaaacatcacccaaggacttctatcattcctgtgatttggggaatgacagaacaagcacttatgataagaatgagcccaattctctgacttctagaccagtggcctgaatgtcagaaatctcagagggaaggggcaagggagtctcttgcaggcgggaggctgtggctcctccagcaagtggaaatattaatggcagctctgcatccttccccagtattggagtggtagaactgggcagaagagtaacacatcaaatgtgactgcacataaaccggctcactagaaatcttcctcaatagatttaaagaaaacatgccatttttctcagacccactcatcttactatgccttctatgacctctccataccacgtgtaccaatagcacatgaaagtagcctgattttggtagttgggttttagcatggatttatcaggcagtttaaatgtttttaacaacagtcccgacaacaatgttctatcatctgacctgtggatctgagctttgtcttcaaccaccagccatgtagaccagtgtgcctgggaaacagataaccccaataaatgaaccacagtcaccaacacatacatacacatgcgcatgtgcacgcacacacaaacgcacacaagcatgcgtgcacacacacacatgcacacgcacattatgttaaatgactagtgcaggttttaggaccaagtctttccaagccttagtttcctcatctgtaaaatgaggctaataatagtataggttttctggggttgtgagtataagtaagataatgtatgcaaagtgctaaatagcgcgtgtgacacagtaaatcgtttggtggctgctaatgaagaaggcataaattatatcaagtacaacttaaatctgagtctgtgctagtgtttggggataccaaaaaagcacattatatagtccaagggataggatggagggatagtttgatcaacaggaaagcatatgtaaaagcacaaggtgaacatgtgaagtaccacatgagcgctatagcgtgttgcttttataatggccagttagggagagttcaccaaggaggggagaatggagggcaagtttgagtagttgttgagggaagaaaaggatttgcacatatatagaagaggaaccacataaataaaggtgcagaggtgtgggagatggaagaattgagagagatttagctcttgagtgtggctggggtggccctcgtgtgctgcaaaatgccagagagactgtggtccttaacatcaggcatttgctctacaggcaataaggagccgtggaaagctctagagtagggtagtgacatgcacagtgtggtatgttaagatggccactctggctgggctggggagacaactcaagggaggaagaccagttaagaggtgactacagtgttccaggcttcagataatgaggacctggtgcaggtggtgccagtgacaatgtaaggtaaggtatggaaatgggagtcactagtaaaatgagttgattggcttccagaggaggtgagctcctgaaagcttagtggcaggtcagggttcctgaaaacctcacttcacctgcctgatggccatctcctctcctcaggtcacagctgcctacatggacacagtgagcttgtctgccactgggttttataggtaagtatggtgttgtccttgcccagctcatagtgtgatgtcgtcctaacctcactggtccactccagcaccgaatcctgccaggctgtggtcaggagagagcagctccacttatctcttcaacagacttccgctaatttcagtctaaagatgctctaaaatatgtggaatggccacactgtgtgccaaggggtaaaagcaccagctgtgtgtcagaagacccgacttctagttctggtctcagggtgcacaatttcaccagaggaagtcagtggtcctgctgaacctgttcccctgtttcctcatgggtgacgtattggggccagtacctaaccattcctccctcagtgttctcctgcagaaaccaggctgtgtagtgttatgagttaggcattgctgttagctatgcatccttctttgtactgtgtgtgggacttttttatagaatgagaggaggatttagagcacgtggtcttattacaaaatgcagaatacagtggaaacttattaatacagggagattttcaagagagcgtatgacttctgcaactttaaatttagtagcagcgtgaatagctagagaccctgcccatctgacttagcagctgtaaaaagatatgatcatatttactgtcagtcatcatattttagccgtctctgggaagtttagctaggaccttttctttcacagatatttggaatattttctttcaatatatttggaaaataattcaatgtttctttaaaatatcatgtctgaatgtatgaatatatagatgcataaatatatatatgtataaacatttctttgtatgaaacatttattttccgtatgtatatgaatatatatatgaacatatatatgttaggcatatatatgtttatacatataaggcataaacatatatacacacaaaaaacatttatatgccctatatatgaacatatatatggctaatatatatgtatagatattacactgaatatatatgccttatacatatatgtataagacatatatctgtataaacatatgtacacacacaaaacatttctatgccatatatatgaacatacatatggctaatatatgtatagatattacactgaatatatatatgccttatataaggcatatatatatgccttatacatatatgtatgctttatatacatatatataagtatataaggcatatatatgtattatacatatatgtataaggcatatatgtataaacatatatacacaaaaaaacatttctatgccatatatgaacatatatgtggctcatatatatgtatagatattacattgaatatatatgtataaggcatatatatgtataaacatgcatatatatatatatatatatatatatatatatatatatatatggtgaagaaatgttttgccaatgctttctaggtttttaatatctgacctacacatacataaacacattttctcataaattcctattacatttctggagttcatgaaactaaggttttataaaggtcaaagcagaggagcatggtgaaagcagaggtcaaaggaattggtggtggttttttctgggagaagccttttccctcagccccatattggttttgtttttgtgcagatctggtcatatcagctcatgttattcctgtgtagtgtatagaataacacagagtcagtgtactgtaaactctaggtgtgtgaatacacatgcacaaatgcatagatatacacatatatttatatgactcaggcaaaagtggaattgtataaggtactccagattgaaaattttaaaaatgtataagggagcatttgtttctattcgtatcatttccctcaaatcatttgttgaactttcaaagggaccagcaggtggggagtggccgcttaaagatgcacccaggttagcatgagatgctgatcttattaactttctcaccttgagaaggtaagcaggagaactgtgtgaacagtctaagagccaccacaggcagaaccttcagtcctgaagaccttggattctaattcagtacatcctttggagtgtgactttcatgtccttcgtgagcccagatggatctgttacctctctttctactgtgcagaggctagcatggtactaaacactgctaggctgtacagaatgagtacagaagggctactggcaaaatagaggagggcccagagacaaaatgttctggaatatctgggtttcgttaacaggttcaaattgttcaaaccatggacttttttggagaacagctgaatgcaaaaacttgtggggtttaaagatgttgtgggtcaagctgtacgtgcatagggaagggggtgtgttcatgttaatacatgtgcagtaccttctctttcctctcccagaacacccaatctgggctacagctttgagactaactcagggaaccccttccactacttcagctatggggtggcttgctctgaagtagaaatcgactgcctaacaggagatcataaggtaagaagtttgcaaaactttagtacttagtgggaaagagaagagaaacaactgagttgtaatacctagagctgatagagacaagatttctggttggaaaaataatgccttccattaaggataggcaaacatcctataaagggccacagagtaagtgttttagacttcgtgggccatacagtctctgcctcagctactgaactctaccattgaagtgtgacagcagtcatagacagcttgtaaacagataagtgtgactctgttccaataaaatatgatttatagacactgaaatttgaatttgaattgaatctcatacaatttttacttgtcacaaaatattcttctttttatttttccagttatttaataatgtaattattagcctacaggccccacgaaaacaggggcaagttggatttagcccatggaacgtagtatattgactcttttgtacatgatctacccagactcagattcaaagccccaggtttctgggaccctatctgactactcacgtatgaatgtgtgttattcccagttactgagagatcattgctgctccccacttcctacccggctgctacaaactcagactccagcggggatggtggcagcagagatttggtgggaacatcaacacttctgcctgagcacacccagggctttctgcttgggaacgtactctttggttggcacttgtagtctgagggtcactatgagtcatctgtcatattccaaacatcttttcctcctctaacttcttgtaattttgctgtctactctagaacctccgcacagatattgtcatggatgttggctccagtctaaaccctgccattgatattggacaggtgaggctcagtgggaccagggtggtgacagacttggccaccgatgcaccccattcccctcctggggccacctgccacaacatgttgtccaaggttgtcttcaaacaggctgaaacatggaacctagggagtttcccccaaagtagaatttagattggtgatagtccaaccaaccctcaaggcagaaagcaaattaatatgggtcaacttgggaagggcactcacaactcaaaaacaagatgagaaatgaggaaacatggcatgcacatgtgaacatgcacacacacccaatttgagtgtgagcacaacgtagaatggggattgagtttgggatcaatgcccagacagtggggtctgaggtcagaagagttttctgtcttctcattcctcctccacctaggacagcttttgtaccccaggaagcagatgctgccaaacatggagtggtggaaggccctgggagcaaaacacaaaggcttaagcagaagtagtaaagggaggtcccagagaaaatcgctttaggagaatatgggattactatgaagaataggtgaaatagggctgggacctgtggctcacacctgtaatcccagcactctgggaggccgaggcaggcagatcacctgagatcaggagttcgagaccagcttggacaacatggcgaaactccgtctctattaaaaatacaaaaattagctgggtgtggtggcatgcacctgtaatcccagctactcaggaggctgaggtaggagaattgcttgaacctgggaggtggagtttgcagggagccaagatcccaccactgtactccagcctgggcgatagagcaagactcagtctcaaaaaaataaataaaataaaataaagaataggtgagataggaaaaaacagaggaggaatcaagaattcaagactgagcatctggtagaaaatacaaattgtacttctaaaaaatggacaactactgagtatacgaaaatctggccattagtcaatctgttcattaattcattgaacaaccatttatggtcccctactgtggccaggcaccaagccagtactgcagacccaaagatgattgccagtcggtttcttttctgaatgctcgttgaggtatggtagtgccccatgtcacgcttctgagcagggggctgagagagcagatgtgtgggcctgtctatcatggcagttaccctaggagagacctgtaagctgaactgcagtgggggcactttctcccagaggacaggcaggggtgggcgttcaaaaaggctggaggtaagtctcaaagaatctactatcgaataaatcctcctgtgagcttgcttcttagctttggctcaccatttccccagtagcaacatggaaggaacatctccatctgcactgcggcaggttgtagtgggaaacatgcccacctagaatcactgaccttccgtgttaatgtctttgctctgcctgagccaaagcctggcagaagtccggatgggttatcccagggctgaggcgggagccaggtaagcaatagagggcagttttagctacattccaggccgcgctgcagttggcgctttgtgtccattgtggcaagtggtatctgtcctcagggaagaaggtggcaggctaactgtgctctccatccatcctgcaggtggaaggggcatttgtccagggccttggcctcttcaccctagaggagctacactattcccccgaggggagcctgcacacccgtggccctagcacctacaagatcccggcatttggcagcatccccattgagttcagggtgtccctgctccgcgactgccccaacaagaaggccatctatgcatcgaaggtaccattgctctggctctgtgctgtctcttctgatctgccctgggggaggccccagcgggtgatgagaggcctcagtgacccacctggtgggacttcaaagggcatatcttgaggagggaagatggtttgacactgaccttggtaggggcagtgggatagttgggcagtcctgcttgagaaccagttaaattgggttgaggagagcaccttagtatggtctgaagcccacttctttgggtgaatttagagggattccttcatcaaatcttctcatttaaatcctggcccacacccatatctcaggcgtacgtcactggtgcttgatcctaagagatgattttacaggtacagcattagtatggtccaatgacaatcagcacattcactgccaatgggatagcacctttgtacacacccttttacctccttcagttgccaatactcgaccttaagacttgatcaggctgggtgcggtggctcatgcctgtaatcctagcactttgggaggcctaggtgggtggattgcctgagctcagaagttcgagaccagcctgggcaacatggcaaaaccccatctctactaaaaataaaaaaaattagctgggcatggtgggacatgcctgtaatcccagctactcaggaggcttaggcacgagaatcttttgaacctgggaggcagaggctgcagtgagccgtgactggaccattgcaccccagcctgggcgacagagcgagactctgtctcaaaaaaaaaaaaaaaaaaaaaaaaaaagacttggtcagatgcctggaggattgtgtcttctatttcttccttatctgcagtaagtatgaaaaaatggttgaaaattgatttagctgatgcatataatcctagtttgaagaaggaaggcaactaatccttggtaaccaaagaaacatccatttgctcatctcgtggtttactttaccatagtgggtggggaagctgggacatattgtgacccttgccattgactgtcatactttaccatgcttgggaattactgaggcccatgataaaaatgtgcctttctggggcccacgcctagaaattttgctccaataggtgtggcttagggccctggaacatgcattttcagcaagtatctttagtgattctgatataggtggtctctgatctatactttgagggggagaaaaaccaacctatgctagaaaatgttttaattcctgtttgttcttatgcctataattcctgcggatgctgtaatatgactatggtgcctgtaaatgttggtgtcagagttgcaggtagactcttcccctcggctagtgactgaggaaaaggttaaaactcacgtcagattttgtggtctgtaaaatacaattaccgagtataactttaaatggtacattatatgtgcatgatgtcatcagagaaaattacatgagtgttcaaagaaatatgtccatgcggtccagtcatgtactagcttgattgttcttagcccctgatcatttctgactgtgccttcctgctgtatttggtgtggctcccatcagtgctttcctggtgccaccagccctcctcgtgcagagtttgctgcctggcctcctaggtccacttgatgatgtggaggcaggaccacctgcctgagcccctgccctgtgccctgtctgtgttcaggctgttggagagccgcccctcttcctggctgcttctatcttctttgccatcaaagatgccatccgtgcagctcgagctcagcacacaggtaataacgtgaaggaactcttccggctagacagccctgccaccccggagaagatccgcaatgcctgcgtggacaagttcaccaccctggtatgatgcccctcaagcatccactcagtccaggggaggccagggataggctggcaaactgcagggaaggttctgcacagaggagaggtgttgggctctctcctaaccgggcagccttgcatcaatggccacccttcattgtgcatggtatgaagcacacactcgaacttgcaagagaataatgagaaacctccttaaagctatagcttgtagctgggcctccttagagatgggaggaatgtgtggtgcacagtcataactcacagattttattattttccatctagataaggatgatggatgaaactccagagagcctaatctttagtatgagtcagtcgctagcatttttttttttaatttatgttaaggacactgtatgaatattggggggatggagggaaaaagaggaaataattaattagatcaaccacatttgtcctgtgatgatcatgtgccattctgatactggggacacatagatgtccttgaggactttgcaaccttgggaaaccagatgattccattatagggtgattgattactgccttggaggtgtatgtggcagaaagtagtagaagaattccgtagtcattggaatcactttaagaagcacctatgtgatacttgtagttggcaatgcctaacaaaagaagactttgctaggacggttgcttccgctttggggatctcagaaccagcccagcctctgagtggtgctgaagtgggctctgtacagtggctttaattgcctttgcaactgcaacctgtgtggagttagcaggactgggttcttcctgatactcaggtggggctttctctttttaaaattcgatatgctttttggatttataggtaaagtgggtacatgtggtcccaagtggggagggcacagaggaaccccaggggcagacaaatccaccatccgcagacctcaacacagtgggtgaaggaggcatatgggtccccattcaggtcttccttgggtctaccaagagctttagctatggagtgagaactacacagaccgtgtggcactcccaggcagtaaagatgcccacatctgtgcagcaacctacccacagcccagaaccttcccactatggctcccaatgctgacaatcacccaaacccatttccctgagaggagtgggtggcatggctcccaataagctgccacagtttgcaaggcgagctctttgccaacagtctgatgcagaactcagtcattttcgtaagctctctgtggccccagacctgaaacaaagatccgtttctatgttacaacataccagcgatttaaaaattcttgccatggatttgcatgagcagctgattctatgaactttttaaggactgtgagtttcaaaagggatcacatctgtattgtttgtcaccatatctccaaaacctaatagaacgcctgccatgtggaaagtgctcagtgaaaataaatgaatggcttaggaaattaaggagtcctgccctgaggcattctcaacagctaggcctgcagagtggtgcttggccttggaatgatggttggcagtggtgggaggtgaggtatgcaagagagtgggaggagcatgatcagcagaccctggcaatgagaacactatcattccttcctagtgtgtcactggtgtcccagaaaactgcaaaccctggtctgtgagggtctaaagagagagtcctcagcagagtcttcttgtgctgcctttgggcttccatggagcaggaggaacataccacagaacatggatctattaaagtcacagaatgacagacctgtgatttgtcaagatgggatttggaagacaagtgaatgcaatggaagattttgatcaaaaatgtaatttgtaaacacaatgataagcaaattcaaaactgttatgcctaaatggtgaatatgcaattaggatcattttctgtctgttttaatcatgtatctggaatagggtcgggaagggtttgtgctattccccacttactggacagcctgtataacctcaagttctgatggtgtctgtcctttgaagaggattcccacaaacctctagaagcttaaaccgaagttactttaaatcgtgtgccttcctgtgaaagcctggccttcaaaccaatgaacagcaaagcataaccttgaatctatactcaaattttgcaatgaggcagtggggtaaggttaaatcctctaaccatctttgaatcattggaaagaataaagaatgaaacaaattcaaggttaattggatctgattttgtgaagctgcataaagcaagattactctataatacaaaaatccaaccaactcaattattgagcacgtacaatgttctagatttctttcccttcctctttgaagagaatatttgtattccaaatactctttgagtatttacaaaaaagattatgtttaatctttacatttgaagccaaagtaatttccacctagaaatgatgctatcagtcctggcatggtggctcacccctataatcccagcactttgggaggctaaggcaggagaattgcttgagcccagcagtttgagaccagcctgggcaacatagagagctcctgtctttaaaaaaaatttttttaattagttggtcttgatagtgcatgcctgtagtcccaactacttgaaaggctgaggtggagagatcatttgagctcaggaggttgaggctgcagtgagctatgattgcgccactgcactcctgcctgagcgactgagcaagatcttgtctctgaagaaaaaaaaagaaataaaaatgctgctatcaaaatcaagcccaaccagaggtagaagagccaagaagcctgggttctcatcctagctctgtctcttctgtctctatctttgtgatcttggactgtcaattccccttcctgtgatccattttactgcaaacataagggttgcagtaaagggttgtctcacgtcttctgctttaaaagcctataaatatatgacctgaaaactccagttacataaaggatctgcagctatctaaggcttggttttcttactgtcatatgatacctgggtctaatgaactctgctgagatcacctcaagtttctgcggttggtaaagagaacaagggaagaacaaacatcccttttattgctccaaatggtgatttaatccctacatggtgctgggtggacaatgtgtcactgtcacatgccttcactgtataaatccaaccttctgccagagagaatctgtggttctggccatggagggaggatagtggaaatgatatagttggactggtgcttgatgtcactaataaatgaaactgtcagctgg

SEQ ID NO: 780 - DNA, 37939 bp, Homo sapiens
acctcactgctaatttccctagcaaataaaccagcagctgctggtccaagttaccactgagaacagggcactgcatgcatgggacaggatgctttcatggagcccttcggtgacacacttggggtctttcagtgcaaaatatacctccttctcttcggtaaggccctgtgtgaattgtgttttagctgtttgttaggttttttttttttaattgtggacataaggtaaatatttgctttaggctgtagatgcattcagataattgaagagcaggtcagaaccttttaacaataacacactgttacagcaaagaagcaggaacatttaagagaaatgagtttcaataaatagattgttattgttttcttggaacaacaattattgtcatagcactcattaagataattcagatatttttaaaagataatgaatttcttcttttagagtttacatataggttcaatagtctttaatgcatttatttcagcaaatattctaataggccatgaaattgtgaccacttagagtgaaactacaaataatttacgaaaattgttttctttttaattaaagatattgttgcaaactgtttactgcttcgttttaagttatctgtctcatcttatgaaatatggaagaaaggtaagattccaaactaacaaaaaaatttcctacacaaaagggagaacgtatttgaaaagattgttactccaaaatgcctttagcttttctctttgcccaatggctagtcctattaagaatttttttctaccttaatattttccctcattctcctctttatcttttgagtttaaaggagtctctttccagcattccaactgctgtctgtcaacattattttcaccagatgttctcatttccattcttcctatttatcagttttaaaagtcaaatcaatttcttgttttgtttatattcaacagataggagttcaattaaggctacattttttaaaaattaagaacagcttagcaaaataagcaatttaacttttaggcttcttcagctatttagagctttactttcactcctatattttgttaaagtttgcattgtaaatgttattattcaaattcatacctactgttgtacctatctcacacatttgaaatgtacagtttgtaaatttttttaagtctttgagtttcccagagttgtgattgttccagttatcacagtatttatgttatcaaatttaagcctataatagatttttgttttctaaaattttttgaaaaagtaaataattattataactgtcactacctttgtgcatttgtcttccttttgaaagtatcctgggtcatcatcccacttatttttatatttaaaacagtaggactactatcattttataagtgttgtttttgaaactggcgttaagaagaacttagagacaatttagttaaggaattcaactaaaataaaacaaatgtacattaggaaaatagcatgttcataaatagctaaagcagtttttataccttaagaccttctctcttctgcaaatttgcttttctccataggcagtgtgttgtaaagaccacagatgacttggcaatctttgcttttaggaatattgaagttttgtttgcttcttctttttaaaaaatttttaaaaatttgaagcctaaaatgtacagtttgtacagtttattcaaaacacatcataatttctattttctctaaagatgcaagattttattttcagtcaacaatacttgtgttatgcttgttaataccacacatgataacagggaagtaaatgccagctattttgagctacagcagaggtcactttgtgaaatctgatgtttatattcaatacaatgaaaccggtctagggagtcctttgttgctggaatatagataaattctacagtaggacttcaagtgtaccttaacactggatacttttttatagtgctattgtcatacaatgtaagagggtctgtaaaggagggatcattgctgcaattttgtatgtcagattatgattagtattataaatgtttctccagatttgtgtaatgccttatatgcaaaaagtcaagatttttttaacagaactataatttataagagtttttgtttgttatactcagaaagtaatagtgaatataataataaaatcgaatttaaatttccgtttaagtccaaatatttggactactaaaaataaatttaaatttcatcaatttttatattatttattatttttgtttttgtattttttcaaatagagacagaggtctcgctgtgttgcccaagctggtcttaaactcctgggctcaagcaatctgccacctcagtcccctaaagtgcctgggattacaggcattagccaccacaaccaacctttttatattatttattttcttgaagtttatctgttcatgcagaggatgattttctaaaatcaataggtttagtcctttgggttttctcatacaactagaaaagagcacttgaaaatttctcaaaatgaagctaagttttctcacattagtaaactactgtgtttgacagcatgaattcatcacatctgtagtgggtgacacatcaatgataagagagtatgtgttcctagaatgtggaggaagcattcaattatctgtttattcccaaatttcactacaagcaaagattgtatcatattgataggttcatgtccaatgaagagattttacgtggctgagataagatactgtataaagaaaatttcattccctgctgacattcttataacttgctacctataatttatctgataaaaaattgtataggcaatctctaagcaaatagttactgtaacagctgtgctatttctcactgtcacacaaacatttgaaaaagcatacatatttgaaaaaaacttttcatttaataagaaagcactgaacctattcagagatattgatggcaatatattatttaaggtattattacatgatgcagtctaaaatagaccccaaaactaattttcccctaaataatgatcacaaacgctatattaaatatctttttctactaatgtagtgttattttttctcagagcttcaatatttgtattgtatttaatatttcattaaataaaattttcctcctataattttagtcatggactctctaaccagtcttttcatatttaagattcaacattctgggtcaagatccaaaagtcatcaacatttctattccagcaatattgtcaccccatagtaatatagtgcctcccaaccatttccagaatattaaataaatctcaatcttttcaaatataactacaaaggaagtcaattacaaaaaaagcagagaaggacttttgcaatggctttcccaaatgacaagcacaaaatgggtcagaatccattcagaccttctcagcctaatggtggtttctaggctgagttgtgaaatgtcctaagtgaaccaacacatccatgacaaagctgctccctattagcagccatgcagctttttccagtgcattcccaaggcaattatacagacttccatcattccccttgatttctttgtaaaaaacacagaattgctgttttattaaaggatatccaaggattgacaacttaatatatgaaccaaaaactgggactcaattcttcaaaattatttaggccctctctcaatttgggtcctctcaaaactctctgggcccttcaccttcaaatataggtagctgctacccttagaaaagcacctcaggttgtcaataacataaaattaagagagtcgagaaaggccttacaccttatctgatattacctcctattcacacatgagaaaactgagtctgaaaattaaaatgacttatttaaggtcacataactgaccaatcaccattttaccccaagtatgtgtcctttactaggacttcatatttcagtagatctttaactttattaaagtaacaagcacagtaatcttcaagttaagagaataggtgcttgaaaatcattattttagagctatttgcaagtgataaatttaagactcaatggcggacatagaacatgggagtccaagatcaggagtgagccatgaaacacttgtaaatattttcatatttacacaagtaaaaaaaaaggagggagcaatacacttaatacagtgaaaggtccaatttacatatcttaagttagtaataacaggtactaagcctatttttttttgttgtcgcttaccaggaacttgtcaggaactgcctatcttcaacttcaatgaaagacatataaatgcattttgttttgtacagaaaacagatagacaaagaggaatcttttcctgtgctgatctcccatccaaaggcccaatgtcttactaaacctatgactttaagagtttcaccccgactgtcagcctctgcttcacatatcttagacatcactaattttgagacatagatttctctctcccatctttctttctctctcctactatttccttgcgaaaaccactacttcttttctgcagtccactttatctcctctttagaattcccagcacccagttttctctttttctaatcactcaaattaggaaaaattccagatttaatagtcttacacttggcagaaaagaatacagaagggaattctcatctttgtaactgctttgttatggaccaatcaccaaagtgtgcaagtaggtccattatcagaagaaaaaaaaattcttagaagttaatcacaaaaacacacagaggccaatgagacaataagacatgtctttatgtttcttttacagtcatctgcttttcagtccatatggtaagtttcagttgcaagtctaggagtctcttctccctctaactaactatcttcctctttggtgttttctcctcttggattctttcctctaacttctctgccaaccccagagtctcactctctactaatagctagccaaaggcccaaactgtgggaatctttgcttctacctccactctgggaaggaaggagataaatttactgttggtagaactggattcctcataggaacaggcctacatctttgagtttttccaaggaaataatcacaaaaggcaaacagatctttctacctttccctttttaaaattgatggcctttcatgacatgacttggatgaagcttgaggactccctttctagtagaatgaaatcaaaaaaatgtagaaaaaaatgaaaaagtggaagcgatcaaagaggatgaacattttgtacttgagaaatttaaaattgtaaaatgcttctatttatatctaatttccatctcttctcacctgcttaaggattttattccactttcacccatctctattctgcctcatcaacatttccctttccagtgaaacattcccaatagcaaaaaactctctttatttcacatttttgatccttctccagcttctgtcccatctctctggtcctcttcacagcaaaacttccctaaagtgttgtctatactcattgtctacagtttcttttcattgtctattttttctctcatcattcaaaatattccacatttaaatttctctcactctctcctctattacgtcaaatgttcctatgatgtaggtatcatattgccccttttaatatgaggattttgaagcaaagagcttccagcaacatggtaacctgagctaaggaagactctcttccccctgcaaatacatagaaatgctaaataaaataaaataatatatcatggcttaaggtaagacggggaaatctccagttgccagaaactgggaagaaacatgaagatacagcagtgaatgcatgggtccacaaatccccagcactgcccagggctatccactgggcagagctccatgccccaaggccctctcaggcccctcattctctcttaaattcacattaatcaggatttcacaacattgcctcttagatgtctaatgggcatctcaaaatgaacgctcccaaaactgaatcctcgtcttccccacaaaaactattctccccacagtcttccccatgattaatttatttactgcaattcctttcttccagttggtccgagtcaagaagcttggcatcctctttgtttctgacaccctcaaagtgtcaccaaatccttttgtcacaatcagcctttttccaaaacgtcttttactaacaccctagtttccagcacagttgtctctggcctattacattgcagtcacctcctaactaagtgttctccctgttcctgctctagccctattcctgtgtattctcacagcagctagactaggtctaataaaacatttaaaaaaatagcccttttctgttcatgaaactcctattgcatccccatcttagagtaaaattgccagagtttttcccgtgatcctaaggtcctgccagtctgtcacagccacctcactgacctcatatcttatcatgctcctcctcctccactgtgctccatctgtacctgcctcttgctgtttctcaaatacaccaaccagatgcctgttctgggtggaaataactggtcatgactgataatggtttaataccactctccttgggatatttgcatttggcaagcatttggctaaaaggaagaacttccaataatggaatattcagtcatttcagacagctttaagggaaactgttgggaggaaataacctctagtatttctcaaatcacatagttagattatgatatgatatgacagacattaatatagtcataattccaaatgttttaatggtttcattggactttagaagtagtaaactttcttagttctccttttcccattattccgtagcaatcgtagaaaataacttctgcttttcctttttatcttgtgcaaccagcacggtctttgggtggagttttttaagtgcagaaggtttcagggacaaatatttacctctatatgtaaccagtactagaatagtcagtacctagaagccactcttctttgaaaaggattatcacctgatcaggttctctctgcatttgcccctttagattgtgaaatgtggctcaaggtcttcacaactttcctttcctttgcaacaggtgcttgctcggggctgaaggtgacagtgccatcacacactgtccatggcgtcagaggtcaggccctctacctacccgtccactatggcttccacactccagcatcagacatccagatcatatggctatttgagagaccccacacaatgcccaaatacttactgggctctgtgaataagtctgtggttcctgacttggaataccaacacaagttcaccatgatgccacccaatgcatctctgcttatcaacccactgcagttccctgatgaaggcaattacatcgtgaaggtcaacattcagggaaatggaactctatctgccagtcagaagatacaagtcacggttgatggtgagtcccctgtgagtgtacgagggcagcagtctagcatggtagttagcaaaggctcaggagactaaactacttcggctttagatcttggcttcacaactttgcacaaatcaattaatcctcaaagcctcaatatctcatggcactaatgacattatctacctcacaaggctttctgaagattaaataagacatgcacataagagatatacctagtgcaataggtaatcaagcactaagtataacttattgtttgtttgcctgggaactatcaagtataatgttgctaatttgatgagatggagaaaatcttattttctcaacaatagactgtaccctgggaagagtcctatttttgtcatgaagatttttgtttcagtacactgtttggaagaggatgagacttgtgcaagaatggtacttaaggacaatggacatgcctggaaatgtcctctgaggaggagtggggtcagctaactttcagacacttattttccttattgaaataagtgacatatgtaaaatatactatgtccaagcccaacttctgatttttgatctctacacctgtttatttgacagtattccccattttaataaatacaaattccattctatcaattgctctagccaaaaccttgtagtcaccgttgacctcctctttttctcacatcccacatccagtccacgggaaagcctattggctttaccttgaaaatatagacaaaatccaaccacttaccacccccagtactgccccactcaataccacaatcagccgcggcctgaactgtcctaatagctttgccacctactctccctgcttctattcctgcctccttcagcttaaaatcctcccattgcttctatctcactcagagtaaaagtcaaattattaacaatctgcaatgccccacatacccagcgcctatctgaccccattttcctatctgcatccccctcactcactcggttctggccatgctggccttcatgcttttcctggaacgggccaaaacacactcctcctcagggcctttgtacttgctgtttgctctacctagacagcttttctccaagatactagcatgctcccctcgtttcctttaggtcttggctcaaatgtcactttatctgtgaagcctttactgaccaccctatataaaatgtaatctcacttctccaacacacacacacacacacacacacacacacacacacacagacacacatgctcagagaaaatagaaagagagagagagagagtcactctctatctccaattctgcttctctctttttcatagcttttattactacctgggcatattatagatttttatttgtttattctttctcttccctacctagaatatgaggtccctaggagcagggactttgtattatttgctgctttgtcctcagtgcttaaaacctttgctgaccactagtagattcagcaactatctgtggaataaatgagtggccacagaggagactggggaggcttcagaggagtaaagatgcagaaggtagaagcaaatgcctagagagcaactgtggggaaaaagaaaagagagatctaaagggaatttccatgaagatttcctatatggtgtcctgtctccctcctaatagaatcctttcttgtgaatcagtagtaaagttgcatctgcttaggaaaatgcaaccaaaaacttagtaaagcctgaatagggttttaggccccatgccaaaattcttctcagaagaaaaacttcttcatctgagttatactgttttaagcaaatgtatgatcacaataccagtgactattctaatgattggttcttctcatacaaaactgttgatgtgttacctatttatctcataccacttacagttccacacacaggtacatttgaaatataagctttttctgcatattaaatgtacacaatttatttttcttttaaaatcataatatcataaacataaagcctttcccagtcttttgttcttgccagggaagatgaaggattaaattaaatagatgagccagttgattacacccttcttgaaaagtgctataagcttcagaattactcgactcccccataagttacctttcgacttcctttctcttatctttcactttcttctatcttctctgggatggagaatttggtcagtttgtgccctaatgcacattttccagtgtagaaaaatatgagcacaagtcaaaataaatctacctgaggaagatgcattgaccctaattaaaagcttgaaaggaaattgaagtctaaacattggacacaatcatctctcacttatgtatcatcctattctctctgtgtcatgtagtcatacatagaaggagattattaaatacacctctctccaaaatgcagaagagaaacattgccagatgtgaagccctcttcattttgctactgactgctgtgtaactctgggcaagccactgtttttatcgattaagtcaagaacttcaatgattaaagaaaattgccagaaatggttgcggattcttatataattctaccatgcttatataatccatcaactttacagttaaaattcagagagcaaatatttactcatttttggaaatttgctttgacaaatattattaagagcctactgtgtggcagatgatgaaataagactattttcctatgacttgactttccaacaggaatttctatcggatttgtatttttttctctaatttgataaaagcccaagaatatattttatcctattttcagactgagtcagtgttgaaataaatgtaggttttggtttgttaaagtgcctaacataatgttacaacacaaatgcaaagcaattaaagtttataattgcttcatgacatacatagaaagaatagttttacatatgtgattcactaaaattatccctcagtttcccaaaagtatagtatatatgttagctgtatattttgcagatgatagaaatttgagttcaccacatccatcccaaccagctgctattgggacattaggacaaatcaatagaggggaataaccataaaaattttgcctgtgaaagtgtacctttatggtgttggtgaaagcacaatgaacaggaaataaggaagctgacattctcagccacctataaagtaaagggcttcattagaccatccttgaaaagtaagttctggaatttgattatctctgactataaatgatattctcatattttgtcattttgcattttccctggctttttattctcttctcttctttagttattacctgagctgtctacatttacagtgtaaaatgctggaataatttctccaggagttcatatttgaaagacctcatagggttttattatatttccatgaaaagaaaaaatcattcatatctctcttaatattgcagatcctgtcacaaagccagtggtgcagattcatcctccctctggggctgtggagtatgtggggaacatgaccctgacatgccatgtggaagggggcactcggctagcttaccaatggctaaaaaatgggagacctgtccacaccagctccacctactccttttctccccaaaacaatacccttcatattgctccagtaaccaaggaagacattgggaattacagctgcctggtgaggaaccctgtcagtgaaatggaaagtgatatcattatgcccatcatatattgtaagtttatttttttttaactcatgagttgttttttgttgttttctgagaatatctcccaggatagtcacagagaatataagtaccagatgtcatttggctttttaccattattgtagttcaatagttctaatcacacctcctaggcactgtcttgtatgaaatatgtctgctagcacaatcctatttcttaaagatcaagttgaaatactggccaggggccactcaggttgtatttcgtgattcagtctattgtgcgacctcatttccagcggaaagcaagattctcaatttcaagaacccagaacaatgcagaggctgcaatgaaaaaaactgaaagaatatcttgagaacttttttcctctccaaatattaccattcctgaatttaacatactttattcttctcttgtaaaatattttctttacatcaattctttcttctagctctttatctgtatgtcttcccatccctacctgcctgtctttaaactctagccataggtttaaatgaaaaagtcctggggaaatttacttaagcaattataggcaaatgcaaatatcatttttgacatatacttttgttttgctatacagttcatattaatctggcaaaatgaaaataacatctttctttcaacatgtgcaagtctatgcaccaatctcattattatcacagaatatgctgtgatacacagtgtggaaaatataaaaatgggagagaaaaccataatcaaacctgcaaatgttaaatattatgctttaggctcctaagccttctttccttcacgatgttatttgaaagaatgagaataccccaatttgagtaagttcacactttacagaatctatcttttgctgacagactgaactttcttctttacattattttaaacattacctatgaaaatctcatagagaaacacctatcacatgcaaagactaacgacagataatagaaagaagaacatttagacaatttacaaatgtggcttccatttacacattgtaaagatgaattatctacatggcttaagaaagattttgactcattaattggtaattgtgaacattgcattactaatttttgtcttcactatttttactttcaaatgcagaattcttcacttggtcaacatctcatcttattgatattcattcattcacttacttattcatttatgcactcattcatttatagattatttgattttaaaaaatgaaacatcagggtcttgtttgtgctaaacaattactacctaccatataacatgtacaaacacaacccagacccattaatttaataatttttcttgctatcactattttagccctgtttttgttctggttggttggttttgttgcttttgagtaacaaaaattaaataaaatatatactgtaatctgaagattggttgtatatcctatctgtggatgtggcatccaaatgtttacaatctttatcattccctgcaagctgggaatatgtgccttggttggtgttattcacacttctctttcttcatctggttgccttcttcttgcctcatgacatcatcatcctttccagaaaggtttacctgcctccacttatctcacctcctcagtgtcactaacaggttcattgtgctccttcagcatcctaggcactctcattccgggtcctcactgctttatattttccttgactcttgtgaacaccccaaacccaaaccagagttctgcattcttcatctttgtatccatagggcaatagctgacagagattaagaaatcaataaagtttcttgaacttaactaaaatggaacagattatctttcttcatatcccttttagattccagtgttacttgacgatgctgtaaaaaggctaaattctcattataaggtgacagcttcttcattatagtgctttggcacttttttttcctgacctttagcaaaatcaagtattctgttttctaaaggcactgtttctgtgaagggttttttcatgaaagtaggaactattttttattttggcagaaaaagtataataaaatctattaagattgactatatacttatgaggttgtgatgtcataatctggtattggccttggtggaatacaatgtcaagccaataactcagacaagtatctacttgcagttcatgatatgccttcaagctccagttgtaaataataacccagtaaccactgcattttgtgtgcaacatatggcaatgctgcagtggagagctctaagtgataaaaattaaaggggaaaaaaggtcattcacagtaaatacttaccatctgctcccaagcagggcggcaaacagcatcatgatgtaaatttaggcactgttcccacacagccataaattgttaaagagaacagatgatatgtgattttacaagtcatttagtaaacagccatccccaaggcaaagggttcatttctattgggagctctctgccaaaggcaagaaagtaaaccataatccaaagtcaaaatggaattatccttctgctttcatcttcagtatcagaggtcactctagttgaatcactccaaatatctccaattggattgcccattcactcgaataatgtactaggctgcccctccaagtagagggatggtcagcctggagttctaatgataaaggaaataacatcatagtagagtcagaagaaagtatattgtaagcaacatgtagagtgtgagatgtagttaaatttgtgtgcatgtgtgataaagagagagagaaaaagatgcattaaagtaagacttgaaaattatccactgaaatgtggatattggttctctgagcaataaaattacaaatgactttcttttcatctttgtgcttctctgaattttaggattttctgcaaaaaaaaaaccgtgcatttcttatataaacagataaactatgttactttttaagaaacatatcagaagcaaggaactgaaatgcttcaaagtgttaggttccaagagtcggaagaggtgttgaggtgggggcaaggaagtttgagggatgtgaggctgcttctgaagagccaaatatagcatataaataaaacagacagaagagaaaaaattatgccaatcatgaaacccaataaatggggaagtaacgaaatcaaaatacacatgattaaggaagataagataatcagattactttctttaaaggtatttttattttaaaccagaatgaacttattaaattaggtaattgaccttatttactagccttggctctaaatgactatgggcttcctctacaaattaaacctaccctctgaaattgaaattgaagaattactgcttgtgagaatactccattatgctgcagggtcctaaggcaactccaaatgaggagttccccaaaaagttttgagcaatgtcagcatgcttgaaaaggagtaacactcatttttatgtgtattaaattactagacagtttgtttttatagccccattctctataccctgaaaaccagggggaagacgaagacctaaattgagtggctgtattttcgtgaccacatttttcttctttatcaagtctgccttgctctactctcagaaagaccctcagactttagattttgtacatagactcaggtctcttgctctcccaaactacggtaaattcctcctgctggtttccttcggtgtgcaccataactgcccgctgcttggtgatctttccttccctaatgttctatcaatgctgacaacatgaagggtcccttctgaaccacagggcctgagataatagccatacatagtatgtggtcaacgtctcagatgtcttcactatgcctagactcataccatgtgcaaagtaatctcaatattgatttcggttgagtgagcaaaaacaaatttttgttcccattacactacttactgtttagtggaattcagaacaaaagagttccatttgacagcacactgttctaaaccttttatcacagtggtttcacctgagactgtgtcacagcctgaaatgagagaacaggcttcttatacagtaacaggaaaggggcagaaatttctccttattttaatcctgtaccttcagttcctgattactttaaattgaaagtactaacttctgtttgctttctgaaagcaggcttatctcatgcaggtttattaataaaaacccatatggttccttcacatttctccatatgtctttttctctagaaagaaaacatagattagtctgttttctagctgaagataatctattgttttgtatattcgttttctgttatagcttagaaaatttgtctcctctgtggcagattggtcagaaaatgctgacatgatagagaaccactctgggaatctgcaaacttgggattggtttgccaatatccaaaatggttttactaggttggtgcaaaagtaatcactgtttttgcctttacttttaatggcatggcaagaatcctggtgtttcaaaggggttagaaagaatcttggcaatcagtcctctaacctgtctttttatattaaaaggtgaggaaaatgagacccaaaaaattcaaatgacttctaaagaatgcctagctagtgattgaaaaaattagttaccctaatgtttagttactacattctatttttctatatgttgagagataaatagcttatacttttaaaaaaatcaggacctttaagattaggccattactgagcaaaccatccatacccatatccagtttgtaaattccctaagaatatgaatgtctcatacctctatctcccgtatactaaatatattatctcatacttagcatcatctctcaaataaatatttattacttgattggatgattacagaattaatattaatatataattagtaattgattgtagaactagtactacagttagacaacaacaaactattatgatatagaaagttataccacttatactttatttctttttagagaagtaatgtgaacgattaagtgcatatattttagaaacccagctctgctatttaatagctatatgaccatgggcaaataaattgtttaaatatctctttcctcatcttaaaattagaataataacatctacctcatggtggttgctctaaatattaaatgttgttatctgcataagcacttaaagtgccttctcatggcagatatccaataaatattggtaatgatcagctgaaaggtgaacataagcactaaaactcaaagatttttagactataagccaggatttagactgaatgagaaaacctatctaggagaagaattttttaaaattttccttattctctgaagaaagcaatgggaaaagtgtcttcacctactggcaacctaacaccatagaaatggtacaatgctacaggagtactgcaatgtggaaaaaaacaccaggggctaagtagttaatgataaagaagatgtaactttttttttcaaatggaatcctaatcttagctggggtgtgggtgggaggattttaaaaattctttaactgttaaaatgttgtaaaaataccaaacacccctatgtctatttgcacagtgtcccatgtgaaacaatgtcttttataaatatttacatggcctaccctagcactgagaagaaaaatagataatactgaaagtatggttgttaaagagaaaatagtggccataatctcttgtaaaaatattttcaagtacaatgactatttcagaaatattaatgtgtagaagctaaaaagttgatctaatagacatagagagtagaatagtagttactagagatggggaagagtggggtggtggggggtagccaaaagttggttaatagacacaaaaatagttaatggacagctagatatgaggaataagttcttgtgttctatagcactagagggtgactataattaacggcaatttatggtgtattttcaaacagcaacaatggtagactttgaatgtacccaacaaaaggaaataataaatgtttgaggtgatggagatactaattagactgatttaatcattacacactgtatacatgtatcaaaacatgtgatcaaaacatcacactgtacctcataaatacgtacgattatcatgtctcaattaaaaataataataaaataaatcagcatataaaaataagctagtcacacaaaaacagcaagattgaatttgtctacaagatggcagatttatcaatacattactcaaaaccttagcatcacaattatgatgacagtatttgtaaaattgtatatgaagtttcaggcttttactatttcagattagttcaaatcactatttcaaatcaaatctcaaataattttcactttcatcgatatcagaataaaacatatttaggtcctcatcatttattgggagtctaagcaaggacctgctcgtccaattctaagatgaaaattttcaaaaacagtaaaatgctactaagctctcccaaactcaaaacctatgttgtgattacttgtgttacttatctatttttttttatattgatgcagatggaccttatggacttcaagtgaattctgataaagggctaaaagtaggggaagtgtttactgttgaccttggagaggccatcctatttgattgttctgctgattctcatccccccaacacctactcctggattaggaggactgacaatactacatatatcattaagcatgggcctcgcttagaagttgcatctgagaaagtagcccagaagacaatggactatgtgtgctgtgcttacaacaacataaccggcaggcaagatgaaactcatttcacagttatcatcacttccgtaggtatgtgtgacatacaaggaagggatcctaataaaacatgaatgcatgctggccttgcacttcccctatcttatacctaggtagaaaagaaaatcattgtgggattattcatatattctaaaaatctctctttccaaagttaactaagccatggtttctatgactcaaagaaaaaaaattcaaaatgaaataggggagaaattcaattcaattgtgaagggctatgaagaaaaagggaattccacaaattacttctaaatgtgcactcttactttcctagttttatgaacaaaaatataagagaaacaggctgttcatttagagggtttatatctaccactgcattaggtcagatgaataagtctccatgagttgggaatctggttttcctacttctatttgattccccttctcactgtctttcatgggctccccttcctcttccaccatttaaacagctgaaatctatggaagttcacaaggggagtctcaacaccttggaaattacaaaattctgtaagtctgtgaaatttggctttctctagaaatcatctgattttcagaaatgtcatcaacccgcaaagattaagaattacggcctaaaatattgatgtccaccaaattctcatccttctacaccttctcttctctctctacagaatggttttattctcctgtatgattttctgtatgatttcattcatttccatgtcttcatgtaacactggtacatcccaaatctatatctttaaagctctaaaaccgtacacccagctgcctctggatgtctctgcttggaagtgccagaagcaccatacaggtctgatatatcaaaactaaaccatcttctttcccccaaaattgctattctgtctgtattgcctatttaagtgaatggccctactaactaccaacctaagacagaaagctaaatgtcatctcagactcattcctcttgcctattccctggtcccacattcagtcaccgagttgtgtccatttccttccttcctatttctcagatacattttcttctctccttcctccttcttttgcctttctttacttatttctttgtattctcttctccttctccctctccccttccctttccctccctactcctctttctccttttcctttttcttcttcctcttctatgactacttctactactgctaagtccttctcagactctcctttgcacacaagtcaaatgccacttgggcaaaatctgggagcaggtttggacaggacatggtggttaaggtacctatgactggtggaagaacaagtttataaaagctactactcattaatatcttttctattgatgccttctctttcttcacctttatagcactggtacctagaaaaagacccataatacagagaaactcaatatgttttgttgaataagtgatgcaacaatataatttcttgtaatccttaggctcagtttttcagtatgttgcccttgggccatctgcatcaagatcacctagggaggtcgctaaaaatgtagcttcattaagacacctcagacctattggatcaggatctttcaggtagcactggagaatctgaatattcagcacatacaagtgtgacaaccacttgtttagtatattttatctccagagtgttttgaatttactaaaaagttcctaaagagccatgaagaattataagactatcgcaaacctacaggttgataaatgtatagtgaatgggtttctcgtaggtactccttggtaccaggaggaaaaatcacctcggtattttgggatgtatatattgtcatggtgggggttttttcatatgaagaaaatgcactgttcattatgatagccactaacctcatttggcttttgagcacttaacacattgagcacttaacacaatgtgcttaacacaactgagaaactgaatttttaattttatttcatctttattaattttaatttgaatgtaaatagccacatgtttagtggttaccatgtcagacaatgcagctctagaatttttacctgagttgcttcatttgggcagtagataataatatatatttcttgtagacccaaaaagcatatgtgttttagggtgttataaattaagcacccattcattcattttttagcactcactatgggccaaatattggagtacgcactaagaataacatatgagaaaggtaattcctcctaataagaattcctgctcacaatctaacatgagtggcaaacacataaacagctgaggtacatcctttgctttccattttattaatttttataggcttaaccagattttcaccccagtagcaaaccaagacataattgtacagcaagccataattaagcacataaaatagtagcaatcctggtatcatcttcagcttgtttctcatgctcactgcaagtgaaaacatggctgtaatgggtagaagtatactacagtaaggctttcccactgcctaaactttctgcattaatatttagctaagatattctcataatatcagaagcccccaatatttgattaagatcttattaccaaggtctaaagacagctacagtcttaacgtcagataattgccttttgcaaaatctaaaaaacctgtttgacctgtacaaagaccaagcatttgttattatagtaaataagaagagcaggtgcttatttttcagagggattcagagctgtcaatattagtgacctctttgtggcttttagagctattttctaacccccaaatgtccacagagctttaactcaaacagcaacaagatggcaaagaaaatgaatagtattgatgtgttttgttaaatatttgttttttctaagtttcaaagttaatgaacctcagcaggacagattaagtatacatcaacctacagttataaatgaccatcacttgcaagtatcagttgagcctactctccatccactctgaggagtaaactcttgagatctgtggagaatttgaaatcatttaaaaggttaaaatacctgcttttgagatgtttccagaaccaaattggtgtttggtgtcgccagtgaagctgtaagtaagagattaacctcttacttcttaataaggcaaaacatttggctgaccaaaaagttttagcaataaaacgtggaagccaaaggaaaacagagccagagatgactccaagttcacagatatggaaagaaaatgacaaggtcaggaaataatcaagttttattggggattttcagtggggagaggaaggctggagagaacaattagttctgtgtttttctctttctaagactacagcaaatggtgactttcccctctttggactatgattcacatctaatttgagatattaattgacctttttgtatctccatggaaatatcctaaagaaaacagagacaacaggcaagttcacacagctagtaagtgataaataatatctgaattcaaagcctttttttttttttttgagatgaagtttcactcttgttgctcaggccaaagtgcagtggcacaatctcggctcactgcaaactctgcctcctgggttcaagtgatcctcttgcctcagtcccccaagtagctgggattaaaggcacgtgccaccatgcctggctaatttttgtatttttagtagagatgaggtttcaccatgttggccaggcttgtctcaaactcctgatctcagttgatctgcccacctcggcctcccaaagtgcagggattacaggcgtgagccaccacacctgacccaaagcccttgtttttaaccactatacaaactgtctcctttgatataactgagaatgttggtgaaaccatatggtctttctaaaaggtaggtatagggtcactttctcatcacctatccaatttaatgctatgtacgtgtactttctcatcacctatctaatttaatgctatgtacgtagagatactctggtttgtctacaatgtgtataatttcatattaatgcaaagttaggaaatacttgtaactgaaaataatgtctatgataacatttcaagaaaagaatagctattaaaataataaattagctttgtgttttgcaaaacaagattttattaccttaattacggacttccttgaatgcagatgtccctactttaaagttttaactgagccaaaattgctattgtgacatgcaatgtatagacagacagacagagagatgatagatagatagatagatagatagatagatagatagatagatagatagagaatgtttatggaaatgtaatcatctgatcagtattcaaatgttcacatttaatgaaggcattcaattgtataaatagaattccctaaggccatgtgggcatagtttgagatttatccataatagaaatgttttcaatttgtacgtgatcctgagaaagctaccattttttacatttatttatatttcccaacttttcttaaagaagagaacaggaaaaagactcaaggcaggaaaatgaatttactaattttttctatctggaaatttctcaagtcaagatgtctaggaaatgtatttcactttgggtctttggaaatgacaattaagatagaactacaaatctgacattcagaccctgagacctaaggtgatgtctccatgagcatccagcactgaacaactgtgtctgtcagtgggcctatgatggagtgtggaaatggcacactcctcaacgtggcaccttcatctccggagggacatgagtcagctgccataatcagtgaacagattggatgagagagatctcaagacttcattttgatgtagaaatggatacacagactggtagcatatggctgtcctgccactgagtgcagtctcaaacagcagggttgcgataccatggataccacacctcttgaccatatttgcacttaacatgttattccattttatttgtttgcctaaggaggaggcaaatagcatttgcactatggctttggcacatgagtccatcatgtttaaataatggggagaatggcatgctatgtgctaaagaatagtataaactctctgaaaggagaaagaaggaagctcctgcaggtgtccagaactgcagaagtgatccctatacattctctatggcaatagggtcagaatttcctgctgtcttattttcaagttcaggttctggaagttcatctttgcaaaaacacttgcctgcagctgagaccacaacaactgtgccccttgatttgatcctttacatatttggcactttttgtgtgtgtgaaaggaacaaatttcaaatgctggacctagtaaatcttgtgtgttctgggatagaggagcagtgttgagagcagagagccagaatgctctagagaagaggactaacaggaaagatcatttcttccgagaaaaggattgtccctattcctcattctccattgggaagactcttggcctttgccacagccgtggttttgggctgacaggcactggtcactacaggaaagctctctgatgtagggcaaacacaggccaagggaagaggcaagagggcaataaggaaggagcctaaagaaataaggaagtaatggaggaaggaaacagtgggatcctctgtaggagagaatgtgtgcaaattaggtcattttagtaaatacatatcaaaagggacaaaaagttaaaaatgaaggagaagggaacatatgtatcttatctagtctaagacatccagtcattgtatattaagcctactgcctgactggagaatcacagaagtgtctggcagagagctgatgccggccagagtgaagcttcactattagaacgggaactgcttggaaatagtaattattagcatatgttcaagtttaagagggaaaaaacagccgagactactcaagtgtttttcagcagttttgctgatggtaaagcacattgcaaaaacttgaatagaataaattagcattgaattcttttttgaggagtcttcaggggttatagaattttggtgatggcagtctggctattaagaagtgaaagatttgaagcacatgaagtcgtatgtcagaaaaagttagaggaaaaactgatatgtaagagcctacctactaattggaaaaaccaatctttgaccacagattaacagaaaaaaagttgaacttgcagtcagaaaaaaacctgtctactctcaattctaggacttactgactatggcaaatattttagtttctctgagactctttctttatctgtaactgtaaatggtatgaattttcttttgtaaatggaaaacaaattgtacatttgattttatgtatatataatatttaatatatatttaattgtgcattatctgaaaattcccttagctagtttttattttattgtcagatctaaaatgacgaaatagagaattcacttgctaaaagtggtgcccaaatcatacgatatatgttaaatcttgccactctattatttggtattttttttcaattctttcttttttattatttatttcttaccagtttttctggtttttgtggtttttttttttttttttggtttttttttttgcttttttatcactgtcactgtctcagagagcattctatttgcctttatcttattgacaaccgcagtgaagtatgggtccttctaaatttatgtcttagaaatgaaattaaattttgttgggcttccaaaagtgcacctctaggatggtagagaatctggaatccagttatgtaaagaacaacaaaatgatcttgggatgctgaatctgaagaagaggattctcagggggagatgtgagtttcaccaaacaattaagatgacatcatatacagagaggatttgatttatttgtcattgcttcaattggtagaactgagtagatttgggcttcatttgggagaaggactttgtttcttctataatgattaggtaagagtggtggaaagagcatggaattgttgttagacattgctaaattcaaatttgagtcctggagtcttagatttcccaactgtaatatgaaactaattattgtatcatagaagcagtaagtggtataactattgattagaatttttaatccctaaagtctaaaagacaaataaaaatgtataactaacaaggaaatagagaagaaaagataaataaaattctgattaatctaaattaggacaagaaaggagagagcaaaggaataaaaaggtaggaaatatagaaaaaataataagattgcagatctaaactgaaatatattactaatcatactaggtcttagtgcgctaaatattccaagtaaaaaacaaatgtcaaactggatacacaccttatgtatgaagatactgaaaggttttaattaaatagatgaacagataaaccatacaaaaaagaaagctagcatagctatatagcaggtcttctaataatgttatttcatttcaacatcatttcattataatattgatgagaaaaaatatcaattcccactggggccactgtgtgtgtgcagtttgcactttctccccctacctacatgggttttctccaggtattccagcttcctcccacatcccaaagatgtgcacattcagtgaactgtcatatctgcatagtcactgtctgagttagtgtgggtatgtgtgtgagtgtgccctgaaatgggatggtaccctgtccagggctagttccggccttgtgtcctgggcttccaggataggattctagccacctgcaagcctgaactagaataagcaggttggagaatgaatgaatgaatacgaatgattgtcaaataaaaatttataaagactaggataatcatataaatgcatgacaataaatgatgtgatatgaaagtgctccgcaagactaccagatttgtgatgttagtttttgaactgcatgatgctaggaggtgctttttacaactttcactttgtaaacatttattccttgatttaacccattaccactaccactgccatcattcacagattcaccaaaaattgagtaaataacgatcttacttgttttattaatctttattcaatgtatgtattcattcaatttatttcagtgtttgatattagaagtgtttgggatctttatgtagaactctgatatttttctgaccagaaatatgttgtagagacttagctcttgtttatatcaattagccaatggttaaattgatttcattatttgttgttttgctcagtcacagtttccaagaatcagctgatgttaagtgaggacttaccgtactggtataagataatgtacataaaaattagatgaattagataaattcttcaagacaagaagcattaggaagtgcacctaataaatagcaaaaattgaccgaaaaaaatcacaaagtgggagattttaacatatttatttcagtaactaataaaacagacaaaaactcagtaggaatagagaaaacctgcctcacctagttgaaataatataaatactacatacaacaacagcagaatacacccttttcatatgactatttgtatagtcattaaaaaaaatcaacaaacttcaaaggattgccctctaacaagaatgaaattaaaccaaaaatcaataatagaaacaccactagaaaactcccaaacttaagaaaattaagcaacagacttctaaacccataggtcaaataagaaattgcagtgaaaattagaaaacattttggacttaatgataatgaaattactatgttttaaaactcagaaaaatgttgctctataattacattgcctacacttgaggaaatgagggaaaaaaatagtggaaattaaacttaaaagtgtattgtgtgtgtttataaggtgtgttaacatatatatgtgcaattttttgaagactttgttactagcatgccacagatatagggtcctatttacataacttcatgtaaacttctctggctcccccaagtcatagagtatcagagcaagaagagaacttaaatgccagtcactctttcactcttgcctcctcattatactaatgtgaaaatcaaaaccctgagagtcaaggggctcacccaaagttacacagctctttagagagaacaatcccacaagagaataatatctgagaaaaggctaagatctcacaaagagactacccaagtgcaaagtggttccaaactaaaaggtcagccttctaacagtgggagaatataaattattctacaactttttatgaggcaaaaataatctaaaaagcttcatgatgttctagtctatatctaggatcaataaattgccattctagttcatttgaagctgccttgcatttatttcttctagccaaggtttgaaagagtttaatttaaaatctgtttaaaggcaataagcaggacacagatattataatcccatagaataacattttaagaatgcagttctctgaacgcatgtcagaaatttataaactccccatcagaaatggtgaagatttttgataatgaaaaacaaccttgtcgaactctttaggacttaagggaaatatgtgaatggtgctgtattgggaaattagaagagataaccgatttccatgatgtgtttactcgatttttgcacatatgatctacactaccttattaaaagattcctgtaagattaagaaatggaagtattctgagtggaaaagccaagagagttaatgtaggttcatactgagagaaagaaaagattaaggcttcctcccttattttggctgttggagatctcagcagagattttatgatgaaagatgacacagtgcaggctggatatttattgcagagctgtgtagccaccatggtctttaccacacccagattttccaggctgttcaccattgctgaatggaaatggcatcacatgactttcactcacacattaatctggacagagacaagcaactgccatgatttatttccacacccatatctgattcacatggtaatatggaagacatctgttactttcatttgttggaggttaaaactacttcctattatatagattgactatataactaaacatattataacctgaagctggtgttaacatagccacagttaataagttgtgttaaaattatattaaagggaggcatcattaagtgttaagagtctggggtaacatctggattctaccacttataacccaagtgaccttgggcaagactcagcttcctcatctattggaagggatgataaaataatctctccctggtaggattgttgtaaagattcagtgagttaatatgtatcatgcacccttagaacagagcagatgttattagcaccgtattttatatagtgatattaataaagggaatgactgataaaacaaagtgaattctagtcaaaaggtgggactttaaatatttttttgaaaaatcacacatacatcctattttaagaattgacatttcttttttctttttaatttttttcatcatttatggtaagagacatttctttattggccaaaaattactaaagtgtgtttgaaatgaacacctcccctcttgcacctttaatcacataccatctccctagaaaattcacatacttgaattatgctaaaaaagcaaaatggaaggaaaatgagagaacaacttagcatttaggaatgtagagacaatgagatgaaacagatctaaggtggcaaacatcactgagaagtacgacatgagatattggctacacctagtacaacacagtcagttttaacttgggcagtgcaccacgtttccaatcacaggtatccctagggagtttagtgtgtgttctaaaataagtgcattccttccatttggtctctctctctctctgtgtgtctctaatatacgtgtttatatatttttttcaatagcgtctcatttaaaatacggcatttaaaaagtcaagttatatactgtagcaatttattgctaaaaatatgtttatctttttatttaggactggagaagcttgcacagaaaggaaaatcattgtcacctttagcaagtataactggaatatcactatttttgattatatccatgtgtcttctcttcctatggaaaaaatatcaaccctacaaaggtaggttaaaattacaaaaaaaaaattgaagctgtatatatgtgtactaaaaaaaaccttaccatttttcttctctcttgattttagttataaaacagaaactagaaggcaggtaatgcatctgtttctatgaaaatagttgttttccttagatgcttattcctcaattattatccctgacaaaaatacctattttgtcttttcaggccagaaacagaatacaggaaagctcaaacattttcaggtaatggccaagctgaaaagggctattatcagttttaatgtatgttaattagttgtgttaatattattatatattattaatgtaatataattaatatgagctaaaattaatataacagtctcttacctttgagttagtgccttcactttacaaagtgctgtcttctgtattggttttatataagtcacacaagtctgtaatatcaggcctggaagcactcttaactccattttacagtcaagagaactaataatcaaggagattaagtcacttgtccacagtcagtaggatcaaagaaattagttctgctaactcattgatcctattattattttgaaaatgccaaagggttctatcactttgttcattcctaaggtaggtttcatgctggcagctccatcccaaagagaagaggaaaagaagatttggcaggggccaggattgcttctttgtccccactgtaaccctcattatcatcaatattgactgtactgacttattataagttaacaaagttttggctcaggccacaaaatcacagggagccaagtttcagttttatttcccctcatgtcaccttaggaaaattatttttcttaaccgcaacttcctcttctatataatagggataaaaacttcccccttaaggttgctatgagaattaaataaaatgatataggtggagtgcctgatatgatgcctggatgtgtaataaatgtgggccttcttcctcttttctagcccttcctgacttataagtgacagaatgtcagagctggcaagggccccagaggctatctggttcctcctaaccacctcccccgccatcattctatagatgatagtttatgtggattgatagtgtaatgtattttactttttatgtatgggaagcttcagttagctatttactctttttgttctgatgatctgttacatctgttagatctgttagatctaacagggtgcagtagatattacgggtggatcaagaactggtgtgaccttcaggcttaaaccctggtgaccatgagtctctggtaactgcaagttacaaaggccaaggttgcccacctgtgtgtatttaaagatgtaacaggctattctcacgtctggctttaagaataattgttccaattcagtttcgattctcagcttcagaaagagtgatttccaacactgcttaatggcaatacgactataggaattaggaaatgttaaattcattttgtacctataccatttaaaacagacaataaagataagttttacaaaggtttaaaaaacaacagcaaatcaaggcattcggtttgtaagcagtatttgttttacatttcaggccatgaagatgctctggatgacttcggaatatatgaatttgttgcttttccagatgtttctggtgtttccagggttggttttcctagtggctgattaaccgagaagtagaattctgcttcaccagaggtgtaaaaagcatttgtttaagcactgggcagtgtggtcaaatggctgcattacccattactgcattaagcagtgttgacttactccgtaatgaatggcattgccagatttgggaagctaaagcatcttacttcgcctttataagtaaagctaacacaaataaggaagttatgctaattcataaatagtctttacctggtaatctcagtgaagagagaactaactaggttgaaagtcaagagaactgaataaacaagctgggcgtggtggctcacatctgtattcctagggctttgggaggctgagatggaaagatcacttgagcccaggagtttgagatcagcctgggcaaagaccccatcccaacaaatatttaaaaattagccaagcatggttatgcatgcctctggtcccagcttcttgggagaccgaggcaggaggatcattgagcccaggagttcaaggctacagtgagccgtgatcacactaccgcactccagcctgggcagcagagtaagaccctgtctcaaataaataaatactgaataaacagcggatcaggagaccctaatttaagtcattctgcatcacttgggtgactgcaacccatcactttactaaactctctctgttcctcagttttccctttattgccccctcatatcttttgacaacattgcaaagacaattgatcacacccttgaagatacctcatgcttcagaaggaagttaccatataggcccaaagtatgcaagtatacatctttattattgccctaaaggtgcatgagatggcaaaggagctttcatatagttgaagtcatttcagtccggaaaaaaaaaaaaaaaaaagatcttttaaagtaatcagtttttcttaacagacatgcagaatgtttctgtgagcaaatcagattattaacatttttatagatttgtatagaaccaagttttcctctgcttccttattctgctatgagagtccatttgaggaagggcaccataaaaacagattacttgcttccaggcattctcatttccatttgttaaaaagactatttgccattagggaatcgtgacttctcttgttcagaggattctatcagtgtataaggttcatctagtaagcttcctcgccacagagtttatttgagaaatgtcatgtgagtaatggagagggactgattggatttcatcctccctaagggtgagtcagtaacagtcacagatgaagcaaagaactactgtgcaaaggctttgcaataccctattcaatctcaggcaggattggctcaccttcacttccacaaccaaaagacaaaaacaaatatttgatggatcagttatttcaaacagcttctcacgatggtagaaagcaccactctgaggtgtggcttcaaattggagagcaggaaactgaagagctaagacttataattgaatttttgaataaggagtttcagtttttttatttaaaataatgcaaacatttattcctaggaattcactggaaaggagtgagatttatgtaagaaattttaaatcttaccatgtgattaatcactactcaattttggagttttactgggaggacctcaattggctcaaaatattatagccctgaagaacttaagcagagaaataggggctttaattacatagtagaagccctgcttatttctatcagaaacagaataacttgatttggagccatgtccatcttcaaagctgcaagctcctgaggaatctgctgaggttcttaattggccattgcaggtgctttggggaagaagtgagaaatcaagaccaacaaccaaaggaggaggatgaggacagggacatgaggaggaggatctgcatgagaagccagaatggcagctatgtatacgtagctatgtaatggaagattagcagccaaatgcaatggcctttagaaaagaaggaaaggtgataataaaaccaagatctcaaaactgaacttgagaagggaaataaattaaattattaactttctgagtttttaaaaatcaaaataagctaggtgccacggtgtgcacctgtagtcccagctgttcaggaagctgagttaggaggatcacttgaacccaggagttcaagaccaacctgagtaacatagcgagaccctgactcaaaaaaagataatcaaaataatctcttggcatattgtgtggtatgtacacaaatggattacttctgtctctaccaattgcacatttcattgtccatttagcacctctttcaggagttagacagaaaacaattgcattaagtgagcaagtttattatttaacagctctaatattaggttaggtaagttagtgatcatcaatagattgcttttaccgtagctcctgaataccttcatacaacaaatatcaagagctgatctcaaggatagatcgtaaaccaaaatttccttgacacaaaaatgacagaagaaatcacatatactaaggcttcatgtgagagctatagcaagtggaatggaaattagtggtttctagaaaaacaaaaagctaagatgttccactaaaacctagcaggtcaaattaacatgagatagtgaactcttcagagttatcaagagcaaagagccctcgaggtgaaggtgtataaatatgaaggactgaaagtggacagaagtaggattaaaataggaagcatttgggatggggaggaaaactagacttcggctaaataattgggagggagtgtttataggaagaaggaagttatgaaatataaggaatgggaattaataaaacacaaataccactttcaataaaaatacctgttggtttttaccagccataaatacactatcctttccacattcacctaagcatttagtttttacagtccattactacatttaaaccaaaacattttcctttgagtgttccacattccttggtactgtctttacttatttgcaatatgatgagggatttgggctgtatattgttcttttcttttaagccacccttgcgcacataattggcaaatagtgtcaaaagggtaactgaggtatagaaaagataatgatatatgctatctgattctaagatatcctgatatcttctcttttgctattttttctttctataatatttcctttacagtactgccagctttcttcttaaatgaagaaaaaatccatagctttgtcaagctatccttcttctgaccttatagctatgctgctgcacaaactgccatagggtaagtgcagaaaagtgtagcaaggaggaagtcaactttctagggaagataaatagttctaattctctaatcatcactactgccagttgttttcaactatgcaacatagtggaaaaactatttactagtcttgagataatttatttttaatgtatcacattttctagatcccaagcaggtctgttccagcctctgattgtgtatcggggcaagatttgcacagtacagtgtatgaagttattcagcacatccctgcccagcagcaagaccatccagagtaagtacgaatctgcatttgatggtgctatggagaggctaagcatttagcttttgctttccccagaactgattaaaaggcacagaagaaaaataccaaaacaagaaattatagcttctgtacatttgaacacacttccccacctgagcataattttgagaaacaaaacaggcaaacacacaaatatcttcgagggccatgcacttgggccagtggactagatacaaaactctagaatcaactttctcttgtgtacattagtttctcacaatatttccccaaggaatccacatctgggtatgaaaggaatgttcaggctaattctgtagccatcttaatgattacttagtgattttccagtggctatggaagttttatggatgatttgtcactaaaaataggaccagtaaaataaaagcctacagagggtccacagcacagtcagcaccaatgccaatcctcttattcaaagtagcctattcccaattgagtggaaccccattgaggactggcctctcacccatagaggacaaaacctgtactgaggacaaagctgggaacctatttatccagttaagctcaaggctgtcactaagaagtctccctttcctccatgccgtggagaaataaagcctacaatcttttgaaataataaaatgaacttctcttttttgtgggctatagctgcctgcagtcataactgccacagatcatcttccatcatttctttgtcacttattgactttgaaaagaacatcaataaccacatacagaaacttgccctctggcaaaataaacagtttcagcaaagtaattcatgcacacttctgggtaaataccaaaaataacagctaggaatgaacaaatccaggaaaaatcatcttatggtgaggaaacctagtgctggggggactgtgcgtcatttaaggactaaataagtggcaagatacttcagagaacctcatcagagaaaatttacctagagtcacataaataaggaacagactgttggagttaggaacttctagtttgaaaaaaaaatgttgtaaagcattgcattatcaatctagtagaacacaagagtaggatattattacatgatattttaagaataaaaactctaaaatgatacctaattctctttactgtctataatagaaaactaggggaagtttgtttgctgttaaatataaggcattgaaagaattttgagattatgtctcctttctaagatttaatctaattaaaatttctatcctatttaagttcatttgtttttctatgtatcctttcttctaactatcaatttttcacattagaatgtaaacaaaccaaatgacaacttggggtttatcttttaaggttattaagaacgaaataaattttaagtcaaaattgtgaatatggcagctacaatttaagaacacaaaataaactgattgggttgttttgcgtgtcaaaaaactgattcttaaaaaaaaaacaccctttgaaactagatgacttttagacactagcaacatcttttgactttcttaagaatataaaagtttatttcataaataagatttgagaattgaaaacaaagcagaaatgttctttttcaggcattcaaaactgctatttaaaaagtattcaaaaccgctattgggacatggtcctccaaaaggcagtcatcttcaaaaccccagctcatgctaccagcccaaactgagtgacatctccacctcccacagcctctctcttctcaccttcttcttctgtcttctcaatcttttttgtgtttgtcagttcatctatgtagatctttgtcttccagtggctctctcttcttttaccttcatcctttgaatccctcattttctgagtctacccttctcttttcctctccttctccataactgtctcccttatccgtaatatccttcttaaaattttcctcctctgtctgtcttccagcattatctaaacggggagccaatattttctaaagtgttattttatttgaattcagatttatgttactaattctaaatttttttaataaataagtgaaatgcttcctttttctttatcagaaactattttgcacttattttacttataatcacttcacaaacatttccaggacatttactatgcgctagagcaagacgttaaataagactcgatcttttaaagatttcctagtatagtgggctgctgtttacttattttaactaaagattagtgattcttagtaaaataaatatttctcagtagaataaatgccacctatagatgcagagagcatttttctttcctgattatctgtggttttattctcctctaggtccaattaaattcaaagatcaacttcatgagtaatgcattattataggtggttggtgactctctcccatctattcccaacttgaatgtgccagctctggggaaagaatcctaacttctctgctttcttttatttggcagtcacttctgagtaggaaagacagccaaacaattttaatctttggctcttagactgttgtaaaataacagtgttattttctttacttcatgtgtctattacctaattggactgctgtttaacaaactggtaaattggtttgtgttcatattctagtactcagcccaattatttatttagtgaacttatggctggatgtatttcaatgttgtctattgacctcattaaatgctcttggtagggtttatattgaacccaagactgacgttagtatattgaaaacaggactttcaagttaagtaaacctttagtttcgaaagtaaattatctacaaaatttaataattgctgactcttatatttatttgttgataaatgtaattttcttgagctagctccaaacattcttctaatctgtagccctggaaagcaataaaagaatttaaagttcttttacctgcagacctgaaaaatctatagaactgtttacatattttgtatatctcttcactaggtgaactttcatgggctaaacagtacattcgagtgaaattctgaagaaacattttaaggaaaaacagtggaaaagtatattaatctggaatcagtgaagaaaccaagaccaacacctcttactcattattcctttacatgcagaatagaggcatttatgcaaattgaactgcaggtttttcagcatatacacaatgtcttgtgcaacagaaaaacatgttggggaaatattcctcagtggagagtcgttctcatgctgacggggagaacgaaagtgacaggggtttcctcataagttttgtatgaaatatctctacaaacctcaattagttctactctacactttcactatcatcaacactgagactatcctgtctcacctacaaatgtggaaactttacattgttcgatttttcagcagactttgttttattaaatttttattagtgttaagaatgctaaatttatgtttcaattttatttccaaatttctatcttgttatttgtacaacaaagtaataaggatggttgtcacaaaaacaaaactatgccttctcttttttttcaatcaccagtagtatttttgagaagacttgtgaacacttaaggaaatgactattaaagtcttatttttatttttttcaaggaaagatggattcaaataaattattctgtttttgctttta

SEQ ID NO: 781 - DNA, 8432 bp, Homo sapiens
ataaattccctcccttcgctccttccccggaacagcggcctctgacaccagcacagcaaacccgccgggatcaaagtgtaccagtcggcagcatgggtaaggagaggggtttccaatcacccattgcctgctctgtctgcccctaatttggaaggccctcctccagaaaatgctagaaaacctgagtggggagctggggagggagtagtggactctgcttcattgtccccagtctgcacaccccctcccccaccaccccactgcatttcccagctcagccaaactttctgaggaagacgggcagaggcactgctgggagatgggatcctgggccctgacttggctccatccagcagaggctgggaccagggtgcctttctgcagctgggaaaatcagatgggcgctcttagaaaacaccactaggtccctggccctcacatagtagagaggtgatcctgatttcagccatgggccaactttgtactccagcgaggtagggagtccaaagcctttctgtgcccaggtcactctctagctactccacacagcaaagctctctgggagggaaatcagagacccccacactctttcactggggacctgtttcaatgcctcccccacccctaaatcccccttggccctgctattcctccatctgtaggcttctgggtgacaggctaagaaggaactgaggtttggttgggaggtccttccccgctcggggctggctcttgagctggcagaatgccgagctggcagaatgcccagcagccagcctgacatggaaaacccacttgagctttccatgagtccatcccaaacccaaagctgctccgagaccttgcttgagatgtttcagatgggggtattccccagaaagaggaatgatgctccctggggctgcagtggcatgccaggcctgaccctaagaaatgctggggctggggttgctggggtgtggggtgggccgaggctgcagagcgggcagctccatctctgcacttttacttccctctcagcttctccctagctttgtattttttgtatctctgtcttgaggtcttggagttttaaaatctcctttcccttctgtatccagcaacctccttccccaccccctgtcatctggtgccaagccccgacttagcaagattgtgtaacagaaccagtctccttaactcctgtgaactggacctctctctctctccctgccccacctccagccctctcgctgggcatcgagcactccctggcattctcctctcctctggcacagcccttcccatatttacacagtaattcattatttttttttttttttagtcagaatttcactcttgttgcccaggctggagtgactgcagtggcgtgatttcggcttactgcagcctccacctcccaggttcaagtgattctcctgcctcagcctcccaagtagctgggattacaggtgtatgcctgtattttttaatacaggctaatttttaatacagggtaatttttgtatttttaatagagacagggttttgccatgttagtgaggctggtctcaaactcctgaccttaggtgatctttccgcctcagcctcccaaagtgctgggattacaggcatgagccaccgcacccggcctaattcatttttatgaaaggcctttggaatacattgtcttatttgtcctccatatctacctagcaaagtaggtagaatatcattattgcccacttttcgtaaatgaagaggagaaaatggagaaacggggcgtcaaaactgggacttgaaaccaggtttccagactctgaacgctgttgctgcctctcagcttcctaagtctcttggctgctgcgagtgggagtcccaggccccagtggaggccccactctgcctactcctggctccccacttgcggcccagctgtgaaggcagaggctggactggccacaggacaaggcaggagacagggcccaggcctgtggactccactccagggtttctttcagcctgccaccccctctgggtattctttaacccctgctccccagcaggccccaaactctgatgctggggtgctggtagctgtgatgtcccagccctactgcacatctgctgacttacatcctggagattagcatggcccctcttgccagacttcagagatagggagggttgctccctatctctctggtgggcaggcctctgggctctccagagttgggccaaacaccttactttacagataaaggaagtggggcacacccaggggtagaaaccagcctgaggacttccagttggtattagccccagaccctcggttatgtaatccagcccttggctagcagcctgggatcaggacccaggggagagaaaagcaggaagtggcctccccctgatatagaagcatcttggtgaagggagctgagcaggcgccaccccactccctgagagcagctcctcaagaacagccaagggtgcctgggcttcgaccagacaaacacagagctgcacacctactgcaccctcgtgtttacttctcgtaaaagcccactgtgaaattcttaccatctccattttacagaggatgcagaaattgaggtcgaggagcttcagtactttgcccaagctcccctggctagtcagtggtgggctggggttgggccccgagtccgtgtcatattcactacaccacacgaccccggctgcatcagccctcctcccaccctcccggggccctgctggactgtctgtccaccttcaggtcatgtgtctccagctcttcccagcacaacctcaccctcctcagggctctgagggggcggagaggacaggccagagcgatgaggctggagtggggacctaggccagccgcactgccgtggcccgctgggatgtgtgctgcagaacgtgcggagggagccttcaccctccagagcgtggcccagccaatgcgccccattgcttccacagctacgaaatgtgggaattgtggacccggctactccacccctctggaggccatgaaaggtaattgcccatggtctgagagccagcgccctactactgattccacagctgggggtggagggacttcagacctagcccccaccctctggcacacccagcacttcccctacctttccttcccaccctgccgtccctgctgcctgctttctaccgtgcaggacccagggaagagatcgtctacctgccctgcatttaccgaaacacaggcactgaggccccagattatctggccactgtggatgttgaccccaagtctccccagtattgccaggttaggcggggcttgggcgccagctactttgagaccatagctgccctcatccctggccctgggcccccccttcccagctccatccttcttggccctccctggggatgcttgtgcacgctcaacctgggacaaggggagtgctgaaatccagcctgtgccgtgcttccaaaccaaaatgagtccacagggcgcctcttccaaaagtggacagaggcgtggcctgggggagcaccacctctccccgcatcctaggtcatccaccggctgcccatgcccaacctgaaggacgagctgcatcactcaggatggaacacctgcagcagctgcttcggtgatagcaccaagtcgcgcaccaagctggtgctgcccagtctcatctcctctcgcatctatgtggtggacgtgggctctgagccccgggccccaaagctgcacaaggcatgtcctctgcccttgccagctcagtagaccataagacacctgccaccccaggtagtctacgggcaggaagccagacctaaaccagcagcctccagctcttacgcggcaactggctcggcagcagggagggaggttggacctcagagcagagtctacccaggcattctgggtcatcaccctccagcacggtgaccagggcatgggagaagagggacaaggcttcttgttttactctgagagagggagggagccatttattcccccatgcagttaggagctcagggttctcttaaaaattccggtctctcccaacactttgtttagtgcacttttggtgccaggcatttactgtgttgtctactggtaatacagagttgacactggtgtaggccagcctgggaggagcttatggtttcacagggctgcgtgtgccttcaggacacatggggaaaggtcagcgctttctgcctggggagttattagcaatctctctgactttcccttgctgctctgtagaagttaccagactgaatctttgtcatattcccacagggagagttgtgtccatgttttgaaggaaaagatgacagagtcagcagatagaagtaggggaagtatggaggttaagagcagggactcccagtcctgtatgattctgacaccattccccaccccttccaggtcattgagcccaaggacatccatgccaagtgcgaactggcctttctccacaccagccactgcctggccagcggggaagtgatgatcagctccctgggagacgtcaagggcaatggcaaaggtacctgccagcactgtgtgctcatgaaaacttccacagctgtgaaatgtgggaagcatttttctgtgggaggagcagaatggaaggggagggttggaatgacttcccaaggagaaccagtgagctggatcccagccagtattttaaatgttagcaagtaacttcagttttgaatatttctattaagatgagtcttcactgatgaattcagttcaaagttatagtcaaaacaggccaggtgttgtgcctcactcctctaatcccagcacttcaagaggccgaggccagcggatcgcttgagctcaggagttccaaaccagcctggccaacatggtgaaaccccatctctgtgttgtctgctgataatacagagttggcactggcaactctgcactaaaaatacacaaattagctgggtgtggtggtacaggcctataacccccacttctcaagaggctgaggtaggaggatcacccgagcccagggaggtcaaggctgcaatgagctgtgattgaaccacagcacttcagcttgggcgtcagagtgagaccctctctcaaaaaaatgtagtgagcagaatggagcttagactctgggaggaatcccactccaaaagtgggaggctggacaagagaaataccaggtgctgagtcccagaagatctcgtgggagaaacgtttctgctgtggtctgagagagagatgaagtagacaggagacaggggcactggcgtaaaggcccccctgccacctggccaaatttgaatacctggatgagaccctttggatgcctgaattttttatttactttttcttttcttttttctttttcttttctcttttttttttttttttgagatgggagtctcgttctgttgcccaggctagagtgcagtggcgcaatctcagctcactccaacctccgcctcactggttcaagagattatcctgcctcagcctcccgagtagctgggattacaggcatgtgacgccatgcctgggtaattttttatatttttaatagagacagagtttcaccatgttggccaggctgatcctgaactcctgacctcaagtgatccgcccgcctcagcctctcaaagggctgggattactggcatgagccactcttcccccagccctggatgcctgaatttaaggaactggcaaatccagcagtggaggtagaggcaatgggcttacagcctcttagacatgcctcggggagagggctggagggtggggttagtgtctctactgcttctacctgccaccctgcttccttccctgttcagggggttttgtgctgctggatggggagacgttcgaggtgaaggggacatgggagagacctgggggtgctgcaccgttgggctatgacttctggtaccagcctcgacacaatgtcatgatcagcactgagtgggcagctcccaatgtcttacgagatggcttcaaccccgctgatgtggaggctggtgagaatccccccatgtgccagcaggagccttgggcctacatccccttgctttctgctccaaatctcccacccccacacttccctcctgtggccccagaatctaagagagatggcataggatgtaccgcatgctcagattgctcaagcgtcttcctgatccctccaatccatttcttaaccttctgccctgattggtggcccagtctttgcccatgccttccaacctctgatgctgagcctatcctccggccccactcccaccccaggactgtacgggagccacttatatgtatgggactggcagcgccatgagattgtgcagaccctgtctctaaaagatgggcttattcccttggagatccgcttcctgcacaacccagacgctgcccaaggctttgtgggctgcgcactcagctccaccatccagcgcttctacaagaacgaggtgacatacgccctctggccctcccctcccagtagtcttgtcagcagctctacctaagcaggcttctgtaacggtgctcccaggcgtctccaggaacgaaaaaaatgaggctgcatgccctgtctctcttctctcagtgctagggcaacttctgcctgaaccctaactggccgtatttatccattcattcaaaaactacttagtgaatgtctgtgctaggcactgtgctatgttctgggaatgcagtggtgaagcagacacaacccctgcctcaaggggcttgcatggagttagatcctgctggcaagaaggccgggcatctattctctccctcccaggtctgggcaacccagatctaacccctagtccccaattctgataggctgacctctctgccagctaacctcaccctccacccctcaatgtagggaggtacatggtcagtggagaaggtgatccaggtgccccccaagaaagtgaagggctggctgctgcccgaaatgccaggtgagtgcctagggcataggaaagttgattcttggcctgggaaacaagagtccttaaaggctctactcgccccctgcccacaggcctgatcaccgacatcctgctctccctggacgaccgcttcctctacttcagcaactggctgcatggggacctgaggcagtatgacatctctgacccacagagaccccgcctcacaggacaggtggagaccctggcaggaggagcagaagggaaggaaggaaagagaagagaagctggggatggggtggatgatctgaagcagctgcaggatgttgagggaggtgcaggaaaagcagacatgtgtgctgtgggacagcacaggcccaggactgtccaggccagggatgggcatgcagagcatgtctgaaaggagagaggggttccagccaggcaagctgctcttcctgcaatgtttgcgcctcccactatggtcctccttatactctgcacctccccatctagctcttcctcggaggcagcattgttaagggaggccctgtgcaagtgctggaggacgaggaactaaagtcccagccagagcccctagtggtcaaggtaagagcctctccccctacttgctggacccctcagacccatgcttgaggaatatgtgggggagcagctgagcatactcttggggttggggtggtgcctaggatctgtgtgttaccctgggctctgacccctggttttcccaagggaaaacgggtggctggaggccctcagatgatccagctcagcctggatgggaagcgcctctacatcaccacgtcgctgtacagtgcctgggacaagcagttttaccctgatctcatcaggtgagaagcagacacatgggctctcctccccagccctcctcttccagaggggtcatttggctttctgaagactcctcaaggagacccctgtaccccaccacacagatggcccattgagaccctggtcattcctccttcctcaggagctttcccctaaaatcttaggggaagggggcagccacctctgacctctcccttaccccattcccttttccaccagggaaggctctgtgatgctgcaggttgatgtagacacagtaaaaggagggctgaagttgaaccccaacttcctggtggacttcgggaaggagccccttggcccagcccttgcccatgagctccgctaccctgggggcgattgtagctctgacatctggatttgaactccaccctcatcacccacactccctattttgggccctcacttccttggggacctggcttcattctgctctctcttggcacccgacccttggcagcatgtaccacacagccaagctgagactgtggcaatgtgttgagtcatatacatttactgaccactgttgcttgttgctcactgtgctgcttttccatgagctcttggaggcaccaagaaataaactcgtaaccctgtccttcaga

SEQ ID NO: 782 - DNA, 365938 bp, Homo sapiens
attgctctacccaccgtcagcagggcgactgccactgccgggattatcatcctctccatcctcaccgccgatcagccaatattggacttgctggtggcggcggcagcagcggcggcgggagtctagccgttccccttcccccgccccagcctccccaccatgtcctagaaaaggtgagtgcagcgacagtcactttgcgctgacagcggcgagagggggtccggagagcgcaggggcggccccgggcaaggcaggttgcgcgcccagggcagagggcgcgggttggcgagcggaggtgggatgcgggcaggagacgagttgcccgctggcggccctggggcaagggtgctgggtggcgggcgagtgatcgcggcggctgcccctgcacggttctaacctagattttgcaagaagctgagatccagggcaagaccggccctcctcaaaggagataaaaacttagtaaaagagacacgtccattcctttaataatgaataattcggcaacgcttgcggagccgccgccgcctcgcgtgcccaggctctaggtccgggactccccttgctcccgcccgccgcccgcgctctgccgacgtgagatcgatgcccagttcgctgggccgggagagtgcgcgtgacggtgggccccgcgggaaagttgggacgctcggcggggactcctggctgcggggacgccgggggcagctccaagctggggaccgaggggcattagagtctggggtcaggaccagctcgcggcgctgccgctgtcgcccctatctccagggagttcctgactggagcggctgagagttcaagtctcagccctgggttaggggtccggaatcccggagcttaactaactgttaaggagaggaggggcctttgggcacagggtgtcccccggtcccccgcctcgggctttggcgggcgcgaagcgagggtgaggcgggaggccgcacagctgccgccgccgggctgcgggtcgccgagggccgggggaccagatttaggtgtatacgtcactgatgctgactccgggccagcggggagcctaaaacggggccttacatgagaagcctaaaagtccttagaaatcaaagttaggaaccccatccttttgcttagtaactgcagcatttgggtgggcgggaggagaatcgaggagggggcggttggagggaaaccgaaatttcttcatgcagacaaccgatccttagaaaacagtttggttccttcccccctcctgtctgtttctcccacttatgtgacccaccccctccacccattataacgtgaatatcctcgatggtaagcttgctttcaaattgaactagtggaaaaatccaatactaaagtagtaagtacagtgacaaaattataaggaagtagaggagcagctcttgaccctgccacttctttcatttatctttctctctctctcttttttttttttttttttttttttttttttttggtgttaggggtctaagggatgggaggaaagctgtgtttaaagggtttttccagcacggttaaaacaactaaattcaaatcgagtgaacgtgatcgtcttgctcgctggcagcgaaggctgctgctgctctgctgagaggtaactctggagacagtggaaaggggctgggagaggaacctcgagggtcgggtgaagcccacccagagtcctccccgcgcgcggacgctgttgggcggcgccagggtctgggctgcagctcacctggagctgcaggtggagagcgtgaggggacgacactttgctcgcggaaaaaccgacttcttccgcgtcagcacacttttcacatctctccagatatcctggggtcggtcagaaggagagcagggtggacgtaagcaagtttggggcggccgagcgatgggggtgggggcagcgtgcggaggccgcctgatgtagccaccgcccggcaccccaagctcccgccgcggctgcggctttaaggaagctgccgagtccaggctgtgtcgcagcaactttgtatcagtcatgtcgcccgcctggtgactgacagcctggattgtccaataagaagcccgcctgacccgtgcggcgtggagccttgcttctcttcgggccaataggaagggttcaggggggcgggatagcaacctgaactttatctggacatgtgacccgcttttaaaagggccagccctccagctggcccactccccctccgggctttcgcccgccctctctccctcccttttttgcccgccctggccctgcccctgcccctgccccctcctctcagcccctccgcgcccggggtgtcattgggcccgggagacgggagccaacttcaggctgctcagaggaagcccgtgcagtcagtcacctgggtgcaagagcgttgctgcctcgggctctcccgctgcagggagagcggcactcgctggcctggatgtggttggatttaggggggctccgcagcaggggtttcgtggcggtggcaagcgctgcaacaggtagacggcgagagacggaccccggccgaggcaggtgtgtaggggcgcgcggcggggcaccgcttgccgtgctcggcgtgcggccgcggcgcgggagcgtgcactttgcagggagaagtggctgcgtaatccggaggcacagtcagtatggtgctgtgtgcttgttgttttgttttggttttccacttttctccccctttggccgccagaggactattttgggaaagtttggccactttggataaatgccctctaactagcagcttttaactgcctttggcagtgggaggtctaccacccttccctttacccaaagatgaatttcggatcattttccctgtacaatttttaaaggacgtttgaataatatttctttcctttatcaattgcggacgctcccaaatctcagccggaggtgtagcgcataagggcagttgaaggagatatagatcctaatagatcctgtataaaaggggctctggaaattcgtgcatttcccgttcgctagcattcgcgaaactcttgagacaggctacgcttcctatggcatcagttggaattttaagggcaagggagaaggggacgaagcttcttttggtggcatccttactctgctactgaattttaggtgcgtggctttgcctactcaatttaaaaagaccaggtttaaataataatggtttatggcaccatcagttttaattatttattatgacataggagttaggaaaacttttgatagcagacgagcttttgaaaccgccgaattttaaaggcaccaaattgcttcctaacattttgtattgccatttctctaggtgctgttattgatgatatttacatagtaatgataacagcattctccatctgtgaagtcctgctgtgaagtttaaattttatgtttgacatcgtggcagctatcatggaaaagcttgagaggagaagttttaaaaaataatttaaagtggagctttttcctttaagggaggcatagttttgtttggcgatttttggaaagatcaggtggctcggtaaattaggtgagtgaatagaaatcaggtgtgctcagttctaactggttctcccgctctctcaggtgaccttgggcagatttctatcatttacctcatctataaaagagaggaacataatagttatgtagtggggaatgacaaaaaatagttacatatagtgaacttttacaactatgcagtctatagatgattgtgagattcttaagctttagtctttaaagtgccatcttatagtcaaataaatataaaaaagatgccttttctatcatttccatcatgatgagattgggttttgggggttactaaaagtgaaagtgtttccagataaaatacaaattcgcaaggatctttgttaatattcccgaaaaaagtacttctttatggaaaagggcaatttaacacagactgtaaaacgtaaaactttaaggttttcctttgtgaaaacagcatttcttttgtgtttgagagcatatgtatggcttaaagtagcacctccaccagtgcttttcctttagtgaatttttttttgtgttttggggcgaggcccatttgcatgaaaattaaaagttcataatgttttttgcatttgtcctaagagaatctttggtatggtttccattgtgaggcaggcaagcctgatttttgttagttagatttgtatacctctatctgcttcattttatactttagtaacataaactttttctttatcctctagatattaagttctatgaggatcatattcatcgactagtattttcagtattcactagttagtacaggttgactgaaattctgctcaagccatggtcattgtgccagttgcaaaaagataacctctgcttcctggatgacatagtaaataaattcctaactggacccatttgtttacagaaaagactaattaaaatactagggagactcaaaatatttcaataatgctatttgaaaaatatctgatcttaaaaaaatgtttgtgtagaagccgtgcagatgctagatgtcttgtattcttttgtgtttgactattgccaatctgtattgtttcctttgttgagaggtgcattaggttggtagatgagaataccttaaacaaagtaatttagatttcagcaaagccttttgcaaattccttaatgagactcctgtcaataatgtggtgaaacacagcctattttatgttattaagggagttcaaggttagccaaacaggacttggaaagttgtgatcagctgtatgatgttagctggtaaggtgctaccttgtccagggctttaagactgtctttggtacccatcatctccagtatagattctcttcaggtcttccgtagcctcacaaatgtgggatatggttcttgctttagggcagagtgccgaaaagtgcagaatcttagtagatgttctttgagaaaaaggtggagtggtcaaattatttgaggaatgctggattaaaaagtaaacagaatctcccagaggttttgatatgcaaatttatatagggaaatttcaaaaaagccaagagtggaccgcccttcccaaaagacaatttggagaatgggttttggagaggggtctgggtgggggtccccttcagacacgggacagagagccctcttgactatgaccaggaagagaatgaggctatgtgagtgacgcagagtgtgccagtgaaggccttcaggtaaagctgttgagacaagagtaacttccaggcatctggttagatggtggtgcagtttgccaagagagcgaatgtgaatttgggggtgtgtggggggagagatgtgcagaaagtgttcagttttgaatacaaatagacatatttattgtgttgtttaatggatttggatctgaaccatttataccttagctatatagtaatttatctttagtatggggaagacaaaatattcttaggtagaaatagaagcagcatataatatttactgctatttttcaatacatagctatgactaaatggttttttagtaaagcataaaaggccagtcttagctatttggatcccaattcactgttttttagtttagttttctatcagcttttacttggctttcatccacaccaaacattttggctggaattactattaatagataactacctcaacctttgtaattttatttattttctactgttttgtgattgatttttgattaggaattcataggatgttctttaagtgaaaacatactacataattggtagattttaatgtttggaaattgagcattgatattataatagttgaaaattttttcaatgtatccacttgggatactgtagtgaaattgatcatttctgccctttgagaaggtaaactctagtgtaaaaacacagaaaagtaagaggtaattataatacttggacaatttggacattaaatttcttcatagggctttgtgctatctaatgcaaatttatttatgagtccagctaagatttatctaatgcaaatttatttagtagcattatttttcaatgttaatacatattctgtaacaaaaggacttcgtgttttttgtttttttttaaatgaagggaaggtaggcagggtggagatagtgacaaagaggggaaaggatgagaggccaaaaataaaacttgtgtatagaatggcagaaacagcatcttttagatcaggactttttttgggccatagattgtttacagactttgaaatgtttgaaaaatgcataatacagattttaggagttttaaaatactaaaatgtaaaaataaaattttactgtgagtgagttaatttcctttaagatatgtttctttacagtggtggttgtcagccaagggtgattttgccccccatgggcatttggtaatgtctggagacattttcagttgtcacaactggggaggtggaatgctactggcatctagtgggtaggggttagggatactgctaaacgccttagcaatgcattattgacctccacaactaagaattatcaggcccaaaatgtcaatgtgccaagattgagaaactgtatagagagagacttgcgatcaaattgcagctccaacacttggttgtgtgtctggtgcctcagttttcacacttgtattatttggataatacttttatcagtcattcagggttgtgtgtaaggataaatgaattaatatatgcaagaagcttgcaatactgcattaaattatatgggtaagaattatatcaatatagcctattatgaagattctgtctgtgaagtaaattgatctatagagcgcatggatatggttatatatctgaaacaacctggtgggttgcttgaggatggggattgtgtctcttttgtttatcactgcctgttcactgactggtctaaggccaagggtgtagcaggcacttggtaaatattgttgaatgaatgaatgaatgcttaaattttcggggctcctctcaaaagtcaccatttaccattgagagtaaacatttctggttgttggcagtcgttctagcagaggtaccactggtaccatgcacaggtcagggtgcatgtcaaagtccttgccagtactgaaatacagagaagacaccagtcattcctgaattgtcatacagcccttctgagatatggaccatctttatcagaatgtatagatcttttcagaactgacattaaattatcttcatcactaatctaaagagagtcttacttttaaaaaaatcaaaaattatttttcctatgataattcacttggtatgtttatgtttggaaagagtaactttaattacatttccatattgtttttaacaaggccatgaattaaatatggaaggcagcttctatatgatccaaagactccaaaggcattggagtcaaaagatttagatttaaacccaactttgtcaccatgtctttgactttgggcaagccacccacttcactaagtcctcagttacctttttttgcctgccttaataattcccaggattactttgaatatctaataagttaacatttgtaaatattttttgcagactctaaagactgtattatagcaaacatgttacttttatttagatccaaaacagttttatatgatcgcttctcttgttctgacatctcgacaagctgtagtcaatactctgttatgtcagcatccaaaaaggtaacagttttaaattagctagaaatgttgctcataataagtagaatatgttttgtggcttagcaaatgcaattttagaatgtcttttagagtaatattgctataactgactctaattttttaatgtaaatttatttgttagcgatggagaccaaaggctaccacagtctccctgaaggtctagatatggaaagacggtggggtcaagtttctcaggctgtggagcgttcttccctgggacctacagagaggaccgatgagaataactacatggagattgtcaacgtaagctgtgtttccggtgctattccaaacaacagtactcaaggaagcagcaaagaaaaacaagaactactcccttgccttcagcaagacaataatcggcctgggattttaacatctgatattaaaactgagctggaatctaaggaactttcagcaactgtagctgagtccatgggtttatatatggattctgtaagagatgctgactattcctatgagcagcagaaccaacaaggaagcatgagtccagctaagatttatcagaatgttgaacagctggtgaaattttacaaaggaaatggccatcgtccttccactctaagttgtgtgaacacgcccttgagatcatttatgtctgactctgggagctccgtgaatggtggcgtcatgcgcgccgttgttaaaagccctatcatgtgtcatgagaaaagcccgtctgtttgcagccctctgaacatgacatcttcggtttgcagccctgctggaatcaactctgtgtcctccaccacagccagctttggcagttttccagtgcacagcccaatcacccagggaactcctctgacatgctcccctaatgttgaaaatcgaggctccaggtcgcacagccctgcacatgctagcaatgtgggctctcctctctcaagtccgttaagtagcatgaaatcctcaatttccagccctccaagtcactgcagtgtaaaatctccagtctccagtcccaataatgtcactctgagatcctctgtgtctagccctgcaaatattaacaactcaaggtgctctgtttccagcccttcgaacactaataacagatccacgctttccagtccggcagccagtactgtgggatctatctgtagccctgtaaacaatgccttcagctacactgcttctggcacctctgctggatccagtacattgcgggatgtggttcccagtccagacacgcaggagaaaggtgctcaagaggtcccttttcctaagactgaggaagtagagagtgccatctcaaatggtgtgactggccagcttaatattgtccagtacataaaaccagaaccagatggagcttttagcagctcatgtctaggaggaaatagcaaaataaattcggattcttcattctcagtaccaataaagcaagaatcaaccaagcattcatgttcaggcacctcttttaaagggaatccaacagtaaacccgtttccatttatggatggctcgtatttttcctttatggatgataaagactattattccctatcaggaattttaggaccacctgtgcccggctttgatggtaactgtgaaggcagcggattcccagtgggtattaaacaagaaccagatgatgggagctattacccagaggccagcatcccttcctctgctattgttggggtgaattcaggtggacagtccttccactacaggattggtgctcaaggtacaatatctttatcacgatcggctagagaccaatctttccaacacctgagttcctttcctcctgtcaatactttagtggagtcatggaaatcacacggcgacctgtcgtctagaagaagtgatgggtatccggtcttagaatacattccagaaaatgtatcaaggtaagttggttttctccatttttttggaagtcatggctttatacatgttgaaggttagcattatctttacagttgataaatttaaacacatttcagattactgttttaaggatggtcatatgttgctccactttgcatgttgatataatgttatttttttgaagtagagggaaaaagcattcttaaaatgtcttagaaaatatctgcattgattttgaaggggcatatgtaggtgtcccgcactccccatttcctgttttaggtgttcggaaaatttatgttttactgccagttactattgtaaatacagtaatttagcagaccagtactagattttttttcctttagctgtttgccggtttactaaaattgctttaagttagtttatttgtggtcttagtccttttttttattatggctttctttattaatcatcacttcatcggttgtgaaagctaaaattgaatcctgtatctgttacccacaggcttccctcccttctgcccttttctaagtaggttaattatatgaaagttgtggtttttcaatacaaataaatcatttccttaactgttgagagcttttaaagactcagcatatctaaaattactaagtggacaatcttgctttcttacttatattggaagtgaaatatgtcactgcagttttgaattggtatatttataacttttcagatctgcaagaagacatattttatttactgtaaaatatctcttggctttccttgttgcagatagcatgttgtatatatttagaaaaaacaaggaagaggttttagatatgactataaagggtggttctaagttatacagtgaatacttggattggactttgcttcagtactgtttttattacatggttgtgataaattattcctttatggactatataaagaatagatttccttagtatagttcattcctttggcatccagaactatgtggatagtttcctttatttcattaaaaattattttgtggggaatatgtccatcccattaacaggatatagggtttacatgtattgctgtggctttctcttattctatttttttccaaaccaaaagcaaaaactttatgtattcttcttattgtcattgcctcaaaccttgcttttcttgcttatggaagcaaacatttcataaaggatacatttttatagtttccccacagcatgaactatttaatcatattctgatgctgtctcttaaattataagttctaacacaagtcatgagatagcatggctgccatcagaaccaaattgagcatgtgttttactgctagtgctttgctttacttttagagaaggacttttttcatgtgttgtgaatatttttgtaaatgatgtttttagtgagctggtatgaggtagtatagcctggtagttaacagcataactggttgaaatcccaactctgctacttaattgtttagttttctcaactgtataaggggattaaatagtacccatctcaaaggtagttaagacaatttaaatgagataatttatgagaaatactttgaattccttccagtatgttagtatgcattgtatatgttttgctattatgaaattgttttataatttttagttttcatatttttagttttctttttcttcattgtatgaaattccacagaatcttataaagaaatacttaaaatatttaagcacttgttaaagtaaatatttgataatctcttatgattaaactcatattttaaaaatgattatgcactatacctttgttattacagttctatttatgcttttttatttttgaaaactattgctttgagtaatgatgtttctggtagaaatattacagatgcagtaagctcaaatgattgtctcttatgtttgttctatatccctatttctactattttaaatgtagttttcatgctccactcaagaagccctcctgatggtccaatgacccgtgcatagccttagacatgttagtatgaattagtgaccttgagcctatcctgcattcataggcacaggaagcattgtcttgtgtctcctcttgagtattccaaaattccttatgtatttgttaatacagtcaacagggattcattctgcttatatacatactagttttgtgccagctaaatttcctaaaaactttaaagctttaacgtgatttgatatctcttatagattaatgattctttacagcttttcttggtgaatactatccaaacctatttgttttgatgattaccagagtaaaagctcaaggatcagaggaaatttagttgtttttctagagttcagtctacatgttataatatttaatttaaccttgtccaagtatcatccttagtctcttattttgaacaaaaaacccaacctttttgcctatttcttaaaatatgatgataactcatttcagggaatgttgaataggttaatgaattaaatatcataaaggatcaaggcagtgtatactgcttctaggtttaatagtatccttcatcattaggttgaaccttgaactgcagtattttctggtagatgtcaaatcatggtttgagggttcctgagaccttttcaaggaagttcacacagtcagaaatcatgctttgttaaaatatccacccaaaatggaacacagatcaatggattttgatataatcttgtatgaaaatttcactgatgttgtttcagattccacattgaaactaacctttaaggaactattcagtgttatttttcagtatagtatcaaagattcatatctacaattatctgaaatgaccattaaaatattcttcccctttcccaacaacatatctatatgagatgagattttctctatgtacttgaagaaaaacatagcaccacacgtagcaatgaaaatccagcagtcttctattaagtgtgacagtagtcttgcaaaaatgttaaacagtgccactcttctcactaaggatttttgtttggggaaatattgtttcataaacagttttcatattgtttatgttaatatgcaatcacttatttttaaatgattttaaaacatttgttttaatttttaatttaaactaatttaatattagttttaatttttaacttaaataatttaattttagttttaatttccaatacagtagcaataactgtaactcacataaacaaatgctctttgggatccttcatactttttaagaatgaaaaggagttctgagatccagaagctgagaactgctggtctgttctcttctatacacgctttggaggttaatgaagaaagaagacattacattatttgtattagtgttactgaatattattttgaggaaggagtgttctattcaaataggaaaaatgattcttgctcaggttaattttttaaactgacagaaatgagtaatggctgtgaggtgtgtgttgtctttatttcagtctgtgggcattcagtgagagtggtgacgaaagtcatctgttaataatttccagtgaatggattgtctgagcaccaaattgtaaagtaaattatgacaaagctaaatgtaaagcccttagaatggacgccggacctagttgtgtcaggtggattagaactcccctgtctgcttggacatcaacaaaaccgctctgagcctcagtttcttcattttaaagtgattaagttgaactaatcattttgctgatcactaatgtgccccaagagctgccagtgtaatttcctttgaagaatcaaaatagagtatcctttaacatacttgctaatttagtttcaagtattttgtatactcaagtctagcttcatggttttcagggtagtctggggagaaaaatatcatttccatttaccattttaaagtaaaaatgaggaggggcgatctatgattttacttgaaaagaggagcagttgtgtttttttaaaaccagatttaaagaaaaaataaactctgaaacttactatgaattccttgttcttcttatttatacaattcctcatggaaacagggcatttctgttgacataacactggctgtttatggcgatagtcatagtcactttgatagcatcataacacagggctaacattgacttagacttttaaatgtaaagtttactatttcaaagggcatattctggtaggttacaagaacagtaattaggatttatcttaatatgtgctgattttttttcacgatagaatgaaacagtttagtaaataacctatatttattcttttatttttcaattgcccctgaagtttccttgaaactcacattatatgacaaaccaaacatcagaattcggggagtttgtgacaaagtttgcccttttactaaactttcaatataaacagttgagaaggaaatatttccatgtaatgcaatgtctgaaagaatggtagggtgtgtgtctgagagagagagagtgtattggtgcttactctaatacataaatccattacagcattgcttaggtcatttgggaatgaaaacatgtaactttcttttacttattatttgtctcataatattttgattttgaaattgctaatgtacctagaatttcaccaggtaaatattttaaatatttttgtaaattattttaaaatgagagttgtttctcctgatattcatttttcattcgcttatatttctgggaagagtggtgataataaaaaaattaagtgttttataatacacaaatcactatgtacagtgtacttttgtgagtttcatttttaaacatcacaaatatcgtaggtttatatgtcagtatgtctgcctcttatcatctaaaatattggtttattatttacatcatactttaaaaatgatgctgagataaaagccatggtttcagttagataacctcaaattattccacttaatgcaattttcataccggtgacatactacggacttagacttttgaatgtaaagttcttactatggagatattacttatagatttgatattccatgttgccttttgcaatattgaaattctaggtgtgtctgaccttttctgtccttggaatgttacagtaatagcagatgttatattgatcaccactaatttaggagcaacactttgcttctcttcatactttgatgtcattatgtttttctgcaaagtagtacttttttcttcactttcagctgttgctttagttttgtactgttcatttgctgataaaaatatacccccactgctaaataatatatcattttgtttcgtttactaaattcaaattgagagaaaaatattagcttcttgattacatttaaatatagccattaacttggatatctttgatgacattccaacatttattaatgaaaaccgaggaaaaataaaagcatgttaaatggatagcgtcttcattttaaacattagggtctctggttttaaacttgtgaagtataggatttgtttttagttttaagagttttattttgttccttatatagtaaggtggtgatgaagttaaaatgtaattacatataagcacttgttaatttatgctctagaaacttctggatttatgattgttagtggtatggctaaggccaaaatttttatgtagaaaagtggtggaaattgtttgtattttgtgctagaaatagaaaactgtagtttaaggaaggaaacaggacaaaaaaaagtaatttgaatgcttaaaaagttaataccttagggagggagtatgagataatagctggccatctggattcataactgtggctatgacttaatttcatttctgatgaatacttcattggtatgtaacgaatattcaccttatatattaggagtttttgagataaatatatgaaaactctgatatgaaactgaaatttggctcgtaagtggcaaaattgactttagatattctggcagggagaggttatatgggcaagtcttggaaaatggggaggtgggggatgatcagagttggtatttacacttagcattgaaaatcttgcagggagtgggtagtgggtacttactggaggagggagctctgtgagcaaaatcctggagatggggagaaaacactgagtgtggttgagccgcgtggtgggctgtgatgtcggggttgggggtgagaaaacctggaagaggctagttggaactagaagggagttgaatttgaaatttacactaagaaatttgtacttaacttggtaggtagtgagttgttatggaaatattggagcaggacatggcaggagaggaagtgcacttggggaaaccttattgggcagtgtgtttgtagggtggataggagtataaagagccttgttaagaaattatttcagctgtgtagaaggatgagagctaggctttctggagtaaagatgttgggggtaatagaaggggacaggtttgagatattacagaaaaagcctatgtaagcgtctatcttttgtataaaaattgattttgaaataatcacaaatttacaaaaaagaaagtatattatagagaactcctagcatcaaggacattcacttacataatgagaatataaccattaaaatccagaaattagtatgggtaagttactggcatctactcttttgctgtttgtcccaataatgccttttatagcaaaaggatccagttcagaattatgtattgtgcttagttgtcatgtctctttagtctgggatagttcctcagtcttttctagatttcatgacttgatactgcttttgaaaattaaagggcagttatttggtagaaagtctttccattgggttttctggtatgtttcctcatgattagattcaacagatgtacctttggcaggaatatcatggtctccccaaccttaacatcagcttttgtaccactgtctcccgctggaatggaatgataatgtaacagaaagacagaagggcaggattctactcccagctctgttttgtgcattcttctcattgcatcctgtcaggtggcatgtgatttctgtttgggttattactatacttagaccacttgattcaggtgctgtttgcagggtttctccatgataaagttactcttttccttttgctattagaatatattttgtggaaggtactttgaaactgtgtaagcaccccattcttcatcagactttgtttattcagatatttatgtatatcagcatggcgtcattgttttttgttttgtgaagtgagttacgtacatactgttactgtcctaatttttgatggtcagaatattcctgattaagccaatggaagcccattgagagtggtttctgtgtccctttgccttgtccctatcattccttgagcacatccttgctttaggcccatcttgtacttttcctgacccagatctggaattggccatttcttcaaggagggttcccatccctgaagacacttttcctctttctgattacagtctaatgccacattctgggtcatagggacaccccccctttctatggctgccctccttatcccaccgaggcacagactcccgtgctgggctgtcctcaccctgctggggttcggacaccctccactagaccacacaaacacacaggtgccctcctgtctctgcttgactctgaccttccacatcaggtttctgagccacccttgggcttgatagacccaactataagccaccacagttggccaccccctttcttcactgtggatacctactttgctgtgtcttatgtaatgattttaggactaaattgttaaggaagaggaaggggaggagttgatatttgagtagaaatagtaaagtatgtggaaaatcggcaaaaacatcatgttatgagcttaactcccatggataatggtgagtaagagaaatgaagagatcagccaggcacagtgtaatcccagccttttgggtggccaaggtaggcacatcacttgaggccaggagtttgagaccagcctggccaacatggtgaaaccccatctctactaaaaatacaaaaattagcagggcatggtgatttgtgtctgtaatcctagctactcaggaggctgagacgcaagaatcgcttgaacgtgggaggtggacgttgcagtgaaccgagaccgtgtactacacttcagcctgggtgacagagcgagattctctctcaaaaaaaaaaaagaaaaagaaaaagaaatgaagaggtcaataataggtttggagcagaagtactgttactttggctacatgagttttaagtgccagacctacctatgattggaaacattcttcatataggtggcgatgttggtctggaggtcagggaggcctcttcatagaaattgcaattgagggagtccctgtggatgctgttagactggtgcaaaagtaattgtggtttttgctgttaaaagtaatattacccagggagggaatgtatgtagtgactcaagtacagtttaaagtgcattttgttaggaacttggaggaatagtgccccactgagaagatgaacaacgcatcctaatgaaggagacagaattatgtagagaaccaagatcgtgcttaagtcatagatgccaaagggaagaatcaggtagtcttagaatttccagtagaagggctccaagactatctagaaatctgacccactatgggcatggatactgaaactaatgcccagagaaacagcatggcttctccagtatcatacaaagtagctagtaacacagctgggaatagaatcctgcctttttgtctttgttaccttatccttttcttccagtgggagatagtggttttctaccagagggttgggaagaccaggaatagaacctaagagccattgacagatgggtgctggtgattttcaagaagggattggattggattgtgattggctaaggagtaaatgaacattgaagaggagaacctggggcatggggtggaggcacaatgcttactcttgggagtatatttgctttgtcatctgttttggtgacagcaaaagtggttaaatggaggagatggtagcgcaaagaaatggcaggttcagagtaaggattttgtttggcaggtgaaatatgaagagggcaatggacttgtgctgagactgaaaatgtgagagagacaagaggattgatgaggcagtgtcctgggaaggtgagaatagaaatgagactgcagtcagcctcagagttaaatatttaactgtgagagttttggcacttgctggtgactgccgtcactattttacagatatgaaaactgagacggagacagtattcgtgatttgcctaaggccctatagtgaaggcaaatgaagaagcaggtatttgagatagagaagaagaaagcagactatcctaaataataggcagccagatggatcttttaaaaacgtaaatcagattatgtggctgatagtttaaagccctctggtggcttctcattgcaagcagcagaaagtaaaataatttagggtctgtaagacactaaattaccaggcccctgattgctatatttagtatctgttcctccttgctcattccccacactgacctttctgtggtttccacaaaccaagcccccttccttttggggtcctctgtacttactggtgcctctgccaagaaggctatgcctcctgattttggtttcctgcctctttcttgtcacttaggattagttcaaatgtcaccctcccagagaggccttccttgatcttcttattgaaagtggtcatcccctgccttctaacacatcaccttctttgtctctcttcatagcagtacctgtcagaatgatctttctttacttcatttctgctagttagcatgtaagcctcctgagagaaggacctcatctggcctgttacttgtacattttccatacctgaaacagtgccaggtctgttgttcatgttcagtaaatattgagagaatgaatggatggattgactagcagagggggtgggtatatatctggcatgactaaatattggtgattatgtaatattaataaaattattaaatgacagagttctactgagttcagcaaaaaaaattgttttgacttctgtcagcatatttttagaattttccacaaaataattaacaaatactgttcttcctttttctcatctcagtataatacagtagttggtaatgatatattccaagataattgatgacttacactcttagtctgcgcaatgagattacttatttttaattcttactataaaattcactctttttggtgttcagttctacatgttttgtgaaatgtgtagtcttgtaaccaccacccaattgagatgcagaagagttctatcattcactaaaattctcttggtcaacccttttcctcactcccaaaccgtagtgaccactgtatatgccctattggtataattttgttttttttttttctatgttgtctataaactctatgtagcctttgattcttgcttctttcactcagtataatgcacttgagattcatccatattattgcttatttcagtagtttctgtttattgctgagtactattccatttatggctatatcacattttattcatccatttacctgttggtagacatttggcttgtttccagttttggctactacagttaaagccaatataaatatttacatacaaatatctgcatagacatatggttttttttgttcagtaaaaacctaggagtggaatcattagaatatacaataggggtaatttcaatttttcagagactatcaaattgttttacaaagtgtttgtaccattttaatattcccatcagcagtgtattagaggcccagttcattacatcctttccaacacttgatagtctttttaagcttaggcattatagtacatgtgtagggatatctcattgtggtttaaattggcatttcctaatatcttaaagacaccaaacatcttctcatgtgcttatttgccattcatatgcctccctttcatgcctgcttactcttgcccatttttattgtgtgtttttcatctttttgagttctgttatcaatgtaccttattgtaaactttttgatagaagacctagaactaagagtacaatagatatttaaaattctgtattggtaggctgggcgtggtggctcacgcctataatcctagcactttgggaggcctaggtgggcagattttctgaggtcaggagtttgagaccagtttggccaacatggtgaaaccccgtctctaccaaaaatacaaacaaatattagccaggcgtagtggcgtgcaactgtaatcccagctacttgggaggctgaggcaggggaaggggaattgcttgaactagggaagtggaggttgcagtgagctgagatcgtgccactgcactcgagcctgggtgacagagactctgtttcaaaaataataataataataggcaattttcaaattatttagtccccactctgtccttaatgtgggtgaacaaaaaaatgaatatgaaacaaaccaaatgtccccactgtattcccatctagttggggaagatagctcacatgagtgtatacagcttttttccccccgccaattatgtgtttgattgtgtgatggagataaaagttgtcaccaaagattagagaaggaagagttccatgtgggctagaatagtcaaggagaccttcatacaggaggtgaagatttcagtagatgtttgaagattggtagtacttgaggggaagtagggagagtattcaaggaataagtaatagcacaagtcaagtgctaggcaggacaaatgaaacttgcctggatgggtttaatggtagttggggaaaactagattatagacattggtgaatgctgaaatgaagttttgggcactgttaatatagcacattaaactttttttttttttaattcaggaatgacataaaagggggtagaaaggttaatctggtaagcgaaggagaaaataaggattgagacaaaagcacagtgtagaggctgtcatattggtaatttaggcagataggagcccaactggttgggatggtgagcgagaggtaaatactagagacaatttaaaggaagaaatcattgaatacaggttattggacccaaaacctgttccttttccactacatgactaaaccatgtatgttaacagcaccacaaaaagtagattgccaaggagtataggaaagaaaaacacaggagtttataggaacaaggagaaactttaagcagagttatggctctaatgtaagagaagaggagcagaatagttttgtttgaatgaaggtaaaacttgatgatttcagtaccaaaatggagtaccttttattagactacagaaaaaaatacccccaggaaatggaaacaggaagagccaactactggtttggcagagttggaaagcaaactggtgaaagattatgtaaatgaattagaaatagtgacatatggattttgatatgcatacaagatctaggcttgtttggaagtctattaattgtgtcctcaagtaactggtgtttgaattcacagtactctttccagaagtagaaatgtgcttattttcttccatcacatggtgaagtttgtatttacttaaaaaatattttttcgatacgtttgaaattctagatgcaaagtttcagggtatagaaatggaattgggagtagatattctttagtttatgccaatttggattctcagtatttttttttgaaatggaaattatatcctgagaggcttttgttcttggaaatttgaggtatgactaaagaatttatgatcatatgatacaaaggtgtttttttttttcctcaattcctctgtcattttcatacccaatctggttaagtatacatgtgagctattcccctgaaacttctaaaagcattctgggctttctatatgtggtagaaatgataatttcattgacatataccctgtattttggacttggttgctatgtgtaaggtgaaaaatagcatttttccccctcttaagtactgttttttagggaactgaaaaaattaatggattcctagagtagaggaaggaggagttataagcatagcaacctttcattgtgaaaacctaaagctcctacatttgtatgacttctgaaacattcagatccatgggtggccactggatgtctattagcaaatacctctatttttgagctaattttcatttaacaagcaaaagatttttatgagagagtataatttcatgaactgtgcatttcatgaactgtgcattttttgaagactgaatttgttgccagtacctgagaatggaagaggtaaagaatagaattctgtgaacatggcctagcctctgtgatttcataatgctgaagtatgcttttttaaaaagttaaattcttgccaattttactgtagcgggaataaatacatctagtattctgagagttttaatgaaactagacataaaacaagttaaaattaatggggaaaatggctagatgtccatgactgtcagagtcagtacattgtcagtatcctccagaaatgtcactgatattaaccaagctgagttatttccaggcgttgaatccatgaagaatgataaatgttttctcatcatacttattcttagaatgttgtgatacttttgatatttcagttactcgtctttaaaaggggagtgcccttccctgggccttgcctaagagaagaaagaaagactatattaagacagaaaacatggacattttaaagagacgaatacactgctatgtgaaataccagttctactcagtaaactccctgtaacctataacaaacaacagtgcacattaaaagcacttaatccaaaaagagttctgaagatggatggtggtgatggttgtacaacagtgtgaaagtgcttaatgccacttaacttaatggtgaatatggcaaattttatgtatattttattataaaaaaggtagttgagtcctaaaaatagggaggtgctacattgtctaataagtatagtgtcatatatgtgctctgttcagtactgattttctttcagcaagcatttatataaacacttgacttggtcaaagcctagtcctgggtgtattagtctgttcttgtattgctgtaaagaaatatctgaaactaggtaatctataaagaaaggtaattggctcgtacttctgcaggctgtacaggaagcatggaggcatctgctcggcttctgaggaggcctcaggaaacttgcagccatggtggaaggtgaaaggggagccaggcattttacatggttggagcaggagcaagagaaggagtggggagctgctacacacttttgaataaccagatctcatgagaaccctatcacaagacagcagcaagggaatggtgctaaaccattcatgaaggattcacccctgtgattcaatcccctcccaccaggctcccatctccaacattggggattacagtttgacatgaggtttgggtggggacagagatccaaactatgtcactgggtatgtggtcagagtggaaaatgaggaagtcctcacttttaggaacacccaatctagataacattcaagatccggttacaaagtaggttgtggtaggtgttattctggaggtaccaaataatgttttgagaacatagggagggaacagttagaaattaaatactaatttcgttaataaaattatgtgatagttataagtgaatgtaatatgattagtcagtactcttggtttgcaaacagcacaaggacccgtctcatattagcttaaagaaaatagaatctcttggcttaaacaaatgggaattcaggaagtacacctcaggcttggttagatcctaggtttcgaatggtgtcatcctatagtttctttgtctgcatctactagggctttactttttttattcagttatattttctggccagcgtcactctgggcttttattttcattcgttgttcaggttaaaaggaataacctttctcgacagattctgattgatctggcttgggtcactcatccagccttaagtaggggtgttgcttgtgtgctcacgtgagtggacgtgtatgcatgtaggtggtgggggtttggtctcacccaaccccatgtactaagaacacaggaagatgtgtcttcaaagggtctggccaaacaaaaactgtaccctacatcagtttcaaaaactgatcatacagtcattgattaattattccctatttaaataggttggtcacattgcttttctaagcattatcattagtaagacttaattattattgaaatgaactgtctggtaatattgtgagctggtggagaacagaaaattaatgattggaaagggcaaaagcaacatgtttttgggaggaaggatctgatagtttcttttacaaagtacatttacagatgctttaataatgagaaaaattaatggtaatcagaatgttttccaaaacagtacactgcagattgatcatcagtcactgatatgtaaagaatgttgccattaatattattctaaaaagctcattaaattggtcccacgaataaatatggctctagactatccagctcattatcattatccacctaagagtacgtaagaagtattttatatcatgtcttctttggccttttcactgagggcctgtgccattctcgatgcaaataatcttttctgaatatgggagaattactaacaaatttatacctgctcaccaggacgctatacatacttgcacatgtaattttgcttatagcttcagaagattcgtgggcccttccttcgccaaccatttcatgaacccatgagccccagattaagaactctttctcttggttgttgttaaaatataactacgtagcaggaagaggaccattgtgatccactaccaatagaacatttatagttgaaaatgcaatttgagttgtttgttcaccagtgatgctatgttatgcatttgtttacatctcataacatgtggtaaatatttatgcaagatggctagccagacaaaaagaaaaaaaaaaaggaaaaacaaccgtgaaatagagaatgcagggtgacccatgtaaacaggctagagatacatttgaaaaagatgagggttaaagagtgtgtagatgttggcaggtaaagagatagcatcctctagggaggatattatcaggagtcagagtaatcttggtaaatgggagaatatgtaagaaatgaacatgtagaagagtggaaagccagcttttaggtcatacttccacttgctcatcatatggccttgagcaagttacctatcctctctaagaatgagtttccttccacctctgtaaaatagtgacactaacagtccttcctcctatgctattgggaaattttctgagctaatctatgtaaagtactggcatgtagagagtgctcaatacaaatcttagttcttattattgttgattgttattagtttcaattaaaattgaaatagaggaataggaacaaataggaactacaatgggtaaataattactcatatgagagtatgacctaagagattccattttgaaatgaattaacaatgtagtattaataaattcaacctctaacattattgtagagagaggaaattcttctagttctttgtgagaacttaattgagaactgtattctctgaacttcaaaaatagagattatcatgaagatatcttagtgatttttaaactctttttttagagcaatacaaatgaagattaacatttacatatatcacatgctccatggtggtttgattgaaaagcattgtgtgggtatgtgtgtgtgggcagtaaagcaaatagcacaagttttgtttttgtgatattcataaaaatcaatactcagcatagaaatatgactcagtaagaattgcttattatggactataacatagataagataggctgcacagtgatgtactgtgatggttttcatctccgcctcttttctcacttgtgaacaccatcagaatgtaaacgagagtggctttattataggaagaatcatggacccttcctgtgtttctgttttaacagtatgtcattcacaaacatcaatattattaacaaattacttggcatacaactcaaaactgatcatgccctgttgtctagtgttctgattatagggacctgtgctttagaggaaagcctgagaatccagtaaaaatgtcagaaatctctccctcttccccacacattaaacgtcactaaatatataatgctattcaaatataagcactgttaagcaggtgattgcaaaatatatagtatcttctttggacaacagaaatgaaaacaaaagaaaccctgttagggatttaaatcagctatgaaaaatctgctcattttatattattgttaaacactgggctggaattattgttttgggaaaaggcccatgagagtttttgctctgtgggtttttaaaggtaagaataaatttcgtgtttgagatgtttttgatgtgcctgtaaccagaatagaagtgtcttagattataactttctctcagattgagtaattctgttgtaataagtcagcatatgttgccatctagtctaaaaactgcatgaagataaaaacatattatataaaaccatctatagtatcaagtctttacaatctcactatgcttaagatataatgccaacaccatacactagataatttccagatggtttaaagagaacctcaattgagaaaaacactgagttgaacacatatctgactcttggatagagaagtcattataagtctttataagaagagagcggtagaaggaagtacgtgtgtgcacgcatgcatacacacatgcatacatacactgaacattttgattatataaaaattcaaaattcccatatgccaaacaaaattaagacaaaatttgggaaatgatgagtaggttgatatctccataataagagctaatacttatcaataagaagaccatgaagacttccaagagaggagggaaaaaacaaggaaaagacatgaacaggcagctcatagaaaaacaaatacaggccaggtgcggtggctcacgcctgtaatcccagcactttgcgaggcggaggcgggtggatcacctgaggtcagcagttcgagaccagcctggccaacatggtgaaaccccgtctctactaaaaatacaaaaaattagctgggcatggtggcaggcacctgttatcccagctactcaggaggctgaggcaggagaatcacttgaacccaggagatagaggttgcagtgagccaagattgtgccattgcactccagcctgggcaacaagagcaaaacttcatctcaaaaaaaaagaaaaaaaaagcaaatacatatggagtgtatgaacttctaaactgtttaatcatgctactaaatagagaaatagaagtgaaagcaacaatttggtatcattttaaattggattttcagaaaaagcaaatggtggatagggagcatagagaccatcgctcttggatggcatccagtggagagtagaaagagacacaagtaatttggcagcatgcactatcagaagtagtgtaacttgattccagagcatggactcttcagccaggtgtcctcagttttaccactttatcagctgtgtgatcttaggcaaattatttattaaccttttggtgcctcagtgttctcatctgtaaaatggagatgatagaatgtaccaaacagtattgttataaggactgagttagttagaatatgtaaagtgcttagaaaagtgcttgtcccatagtaagtcctacataaatgtatttgctatattattattatcattgtctttatatacctcaaaagatccagtttctaggagtgtgtcatcaggaagttgttatacatatggaaaaagatttatgtatgatgatgttaatttagcataatttacaaaaatttaaataacttttttcccagtgaattggcgattagccaaatcttggtaaacttatttttttcttattatgatataaaaatgcagctatgtctatgaagaaaatttataggaaatcattacaatttattttttatatttaatattatgatatgcagctctatagacagaatttgtgtctgctcagttacgtatgtgtatattttattctcagtgggaagaaatgcatgtatttttttcttagtggaagaaaatgcctcgaaatcagtggtgtttgtctatgagtaataggattacttgctttgtttatttttctttttgtatttaccaaattttctacaatgagaatgtattgtttctaggacgaaaaattattaaaagagcagcagtaatgattttatttgagagtgtaataaatctctcacatgtaagaacaagatcatctttgcctccagatggcactaccattttcacagagaagtagagagttctgggctgatgagcattttgttcagttaggatctaggcttcatggatacatttgtcttgcttcctaaaccagccctagacagacgggtggagggaggcatggaccctgcacatgccccctgagaatgctgctttttttcttgcaggtttttgcctgcttctagattctttaaagttatggggccatttgttgtaacatctattaaaaccacttgagagcaaatgaaattgtttgtttataataatctgaaaagcaagcatgatgaataaaatacatttttcatagtatagtttatttcctaagcgaatagagcaactttaaagagctattagggcagaataaaaatactacataaaaatcattatttctaacatttatttctcctctatattaatgatctttcctcctgctccatcattctatcaggcctgaaatttgactccttcagttcctgcgatcctgtaagaatggttctttcaggttcttaggttagatcgacaatcctttgctttttcttttcttttctgtttattattttaagttgcactgttcttacataatgatcctttcacttagtgagataaggcaaagttaactgagtaaataggaggagttttatttattaattggtattaggtgaatcactggaaattttgagcctaacagatttttctgtaggcaaatcagttgcaaaatattttaaagatttgcatttatgcatatcatgaaaaactgttttaaaaatacttttgttaataaccctaatactgttaataacttcatggtttgtaattggcctgctgactgaatattcatggagtctctggacatggaaatagtgacttatctagatttacatttatgatttattcagctgttattgctaagtagtatttttatagtaaaaactaaatattttataaggcaaaaggtaaaggaaaaataattatcacataaatttcctttcagaagctctcacgtctaacatcagtataagtgacaaattattttccacaagtctttaatgtatttaagtctgaccaactggtaataatttttgagtattttttttgaaaaataacattaaggtcaaaatgcaatttatttgagatcagtaacaatcaaggtggattatagttatctactggaaagttgaattagttgaactgaacagaggccatatcatctagacagtggttaggaattttcatatgatgccttatttatctctttattatttttaaattaattaacaaaagcaaaattatagtactcataatttgctccccagagttaacaaatgttaatttttcattgggttcagatctttctttaaatgagagacagaatattacaaagttcaaatcagatttggatcccttccccacccttttcacttcctccctgtctttgcggaagcagtccaagtcaagaatgtcatctgtattttctgcccatgtttttatcctgcatatataggtgtatgcgtatatttagcaattttacataaatggaatcttacccttgcaaaacatctaatgatttttgagctttatgtgtgatgatacatttagatgtagtttattttactgtaattgcctgatagtattctatcgcttatctggttccctattaatggacatttagattgtttccagttttattgctgataaaagtagtgctgcagagacaaattttgtaaatgtctgcttatacccaagagcaaagatttctctaggatatataattagaagtagaatttctgtgtaatgaagaaatgtatacatcttgcattttataaactttgcataatgcctgccagtagccagtatgtttgtactagtttacgttctcatcagtatgtgtaaggtactgatttgccacatccttgcttacgctttgtattgtgggtaggaagtagtgtatcatttgtaatttaaatgtgaatctcctcattacaggaaaattgggcatattttcataggtttgtcagactgagtttcctcttctataaattgctgttcatatcctatttacctatattacttgtgagttaatgtctgtttattgatttgtcaaaggtattaatctgcgcattaaacttttggttatgtgagttgaaaatatgctctcccagtctactgcttgtgctttaactttgttataatgttctttttcatacagatgctttaaattttgatgtcatcaaaatttcaatttttactgcttaaggtttgtgctttatatcccttgcctaagaaacccctctctactctaagttcatgaaggcatttttcaatgtattcttacagctgtatttctatttttctttaagtctcaaagcttttcatgtagtagtggataaaagaatttattttttggaaacatagtagttactttaggaaatgatgcatttctaccaccatcctctaaaataatcctcacagtgatagggatgattccctatgatatttaagaggctaagaacagaatacagttataccctgtgacttacgaagagtgagtgctatatagctatttagaagctttcaataaacactaggtaaaatacagaagttggggctgtttatttcttatttggttttgaggttcaaatatttatgaaaatattatgcttgtgtggaaagataacataggggacgcttctagttttgatcagttattcattgcagattgagattgctgtcttaaacttcttttgaaaataaatacaaggccacacagactggaaaagctcaagtgatatgtatttctgctctaaactctcaacagtttgtcacctggggtgtgatgggacactcagtcatccttttgggatgaagcataactaaggggtgtgtgtgtgtgtgtgtgtgcgcacatgtgcacctgtgtatgcacgtatgtgcatattcacagtgttgtggtctgggtcagagagggagatttcagtcacagattaaaagataaaaattatgtgcttttagaaaatataaataagtaaaagaatgtaagcctagaatgtgctgacagttgagtttttgaaaatacatttcaagttgccattataagactcttagatgaagctaatttttgttcctaataaaggaaggagcatttttttttactccttctccacatttctcttgtttctgcatctctcttccaattaaattaccaatagacagtgcctgcattttattattgaaaggctaaatctgaatctccaaactgtgaatacttagccaaaaatctagttagaattccagcttgatctttttttacttcacttatgtattctaatatagtttcagtcttctgaaatttaaccaattttcactgtaattttaggaataagtcagtcccaggaaaataagtgattaaggggatacattgctttcctaacagtaagaatggcacagctccacccacccctccctgcaaagaatgaaagccacccactgatgtctgcagcggaggttgtgtgcagcaatggtcagtgctgccttggatgtttattgtgttcaccgagtctcagtcgtgatgtgctttccaggcattagtccctatggcgaccccaggagacaggtgtgataaccctgctttgctgatgaggaaacttacacttttgagagggtgagtagcttggccaggatgacacaattagtaaatgcaacaactggatgtgttatagcccagctctgaccaacccggaaaccctcttttttaaattgatgctgtctccctaaaatgtgcagcgttaagttttataagtggattttcttgttctttacttgggaagaatgtggaaggagaggaagaggaggcctggagttccttcatcttggtatgtgttgcagaggaagcaagataaaggaaaactatttattctagcaacactgaagtctaaattttgcctgcttagtagttaatcttagagcttgctctggttgtctatgcatatggcaccttacataagtatcttttgatgtgacattgtctgaagatgatgtgagtaggacgacactgtccagaaggtttaaggatagatctcaatagcattgtgttgaattaaaaagaaagaaaaaccagtgtcgagcaatatagaccttgtgatgccgtttatataaaaatctaaaaccacatagaatatgtccatttgtttatgtgtgcatataatggaagtataaaaatacagaacaaagatatcaagcaaaatttaattagtgcttgaccctggagagggagggacaggggaacaaacacattacccttgtctgtaatattttaattttattttgaaaaatatttgaattggatttggatttcattaaatgttaacatcttttaaatctaaatattaagtatatggatattttgttagatgctatattattgcctgtcctcttctgtattcgaaatttttccccaagtgacagcaacaacaaaatgtggttatagccaggatgatttgctaccaattgctgggccccaaaacaaaaatagtttggaacctagaactagtttctttgattctttgtttgggccagtggtgggtggtgggcgggtgggggacgggcagttgatgcaaccagccaaaatgaaagacattaagctcttgctacaactaaaaaatgtgtagttggaatatagcaagaaactgcaatttaggtctcccaaattgtataagatgacattgagttgaaggtcggagtactgaagattatctaaggtttcctcgtaaggtttagtttggcttatgtctttggtgactatacgtgttctgtgtatctgaaccctgacagtagtctgtaaagcatatttttgtcactactcctggccaaatgatgtgtgatactcttgtactgtgtgggcacatgaattatagcattattacctcaattattttaggtaagaaagaaatctgaatggccagtatacaaatactcactgcttggagtgaccttttttcacctctcagtctaagatgttcatgttaacttgcggataggtaagaaaaatacattcttttagggattctgcttctttgagttatagtgaaaggtccctggccgttgtacataggtcacaagacaccaggttgtattttaattttatttctgtattttaaactttgatttaagcttctgcagttaaactaggatgtagtgttaacagttccctgaattaagtctccataagtttgaagcccataaactactgttattgcttatctaaaggggaatatactgtgaactgaagatttgagaaaatctggatttgttaattcttggacgatggtgtagtttcttggagacttctctgtccattgcctcattttaatcacttgtattcaaaactttattattagataacttaagtactgtttcattcattgaaagcatagttaacttgacttggaatggtatgggtgagaagcagccagctggtttgagatgaactgagtttagatagcatttgattacaacttacatttcataacaatgggaaatttacatgtacatacaagattattagcatattttctaaaagttggacatggtttttgaatttaacaattcaaacattgaaaaataaacattgttttttaaaggtacctaattttttatgtgacgtacttaatagcttttatagaaaacatcatgtataatggtagttattggaatttatgtagtttaaaaaaacacagtttaaaggactttatagacattatgtcatttagattcatccttctcttgtgattttagggaaattatccaattttcaattatgtgtaggggaatttttagcgaagagaaataaagtatattttccttacattcctaaggaaaaatcactggttaaaaaacagaatttaggactgagttagtaaattacctactttgggacattgtaccgtgaacttatttgagatataatagttaaaaggacctgctaggcaaaaaatattttgcatgaagtttaaatatggatatattttcattttaatatattttcaataaacattttattatatgctcaattttcaaacaactaacttggaaattcttaataattggagataattttttaggtagctaattctttggaaaagaaaaataacatttctaatatgctttctgtcacctaaggaaaggtccatcagaaaaggtgaagtttaggtttaaaagttttgacaaagataacattatgacaagacagataaggcctaagtctagtggatgaagacttgggaacatgtgactatccttgaaggtggcaagtcatgggttatttaaattaggtgctgaatagttcatggctcaatttgataaggaaaaacaccaagaatttttagagacagaagagaaaatataaaaggctaataaacgtaagattttatctcaatatcaaagacataattaagacaataaaacctattccttgcttttcatattgacaaaatttttagaatagtttgcttttataaatgagaatgcacatattctcctaatgacagtctaaactgggatatcctttctggaaagccgtttggcaatatgctaggagccttgtttctttaccttttgacccaatatctccacttctaggaaacgatcctaggggaataatgagaaatttggacaaacatttacaacaattcattgcagtattagcaagacctagaaaacaacaactaataggagaattattcaacaaagtttggtatgttgctattatttaggactagtagatgttttaaatatttctaataactttcaagatacaggaaaatgctgtttcttataatactgagtgaaaaaaaccaggatatagaacaatatataagcatgatctcagtacttcttatatatgcagaaatacacagtcttaaatgtattaatagatcaattagatgaaatacactaaatatttctctgaatggtgatattatgggttatttcattttttcttaacacttttattttctgttttctactgtctgttttcataaatagataattaaatagttaaaatggttgcctattggtaaagatacctgttgatcatcaagaaatgtggttcagcattttttgtaaaagaaagtatctttgaattataaggttttagtggttgactagatcatttcaatgagtttaaaaacctgagtttgatgctgtggagtataaagaaacagaatgatctctgccttccaggtatataaaacttggtgggggaatcaagataaaactctactgaaaatcctacaaataaaatatctgaattttagagaacctacctctatagtcaccttaaaatagaggatggaaatctagtttatgttcctagcacatatttttgttttttatcagttacctgataactggctagcactgatcaatataattaattattttgatcattttctctaattcgttgaggcctggcttggcccctctgtgacatgtaacacccctttcctctgttttgatgaaaacttgaaacacattcacttagaggtagtggtcccctgctagttcaaatgtgatagctaataaagaacctttttattttgtagctaagggtattgattcagccacatgttgggttgcctcctgcttcagcacaatagccggaggaggcaggtgggagggagtgctcttctaagggtgtgtgtagtttctgcttttggtgtgctctgaaaatctaatctaaaaactgttgcttttttaacttccaggaaggttttactgagagcatgctaacaggttatcgggactttctttacgttaacttgctaatatatattattggaagaaaataatattagtgttcaaagtcaggattgaacatcattccagtagtaaatagtgatgggacaaggatattgatatgtgccattttacagtacttcaataagactaaaataattaaaagaactcctaactaatgtaaaaatggaatgatgaactaatttctttagaaggatgtattcctaatgaagggggggcctctgatagatttgagtgatttacattcatttagattcattatgtgcgtatgcttgcaaatgatattctagaactatgagaaaagctttttggcatacttggaagtcgactgaaatcctgtctcagtggtaatttatacagactttaacactgttttatttgaagaataagctgtttaatgaatggatcaataaaatttcacaaaagtaaaccaatcaaaactaattatatgtttgagaagcatgataaaattatttttatatgggaaaacacatgaaaaagatacatttttacaatcttataaaccacttacggccattgactctgattttaagactttctttagttgaataaaacaatcaagtgaaccctacatgtaacaggggtttctgttgttactagaccacatttctcctgtattataaatgccatcttcctaacaatctgtgactttgagtactgtgtagtgactggattgaaattacactgcttgggtttgaattctggctctggacagttgttagtattgatcttggaaaagttattaatttctataagcctcagtttctccatttgtaataatatgcttaatttactcggtagttgtgaagagtaaatgaataatacccacagatacatttagcgcagtgcctggcacttctgtaaacgttaactctttgcaaatggttgtcatgatttaattaagacatatttttaatacttgctgttacattttcttaggctaaaacatgtaagtccaataattacgcagcttaaattcacatctcactgaaactattgactgtcagactttaacactgatcctggactttgcgttttctaggccacacattctgatggttaagaaattgaaacagattttttcttaataattatcttggacagcaatgaattgttttatgttaacattcttagagtttagtatttgaaaactcctaaatgtaaatatttaggatcctatcagtcagattcttagttaaagcttttaccggcctcctatttctcttaggataaaaagaccagacttgtaatatggcctgcaagaccctggcctggctctgaggagctctttgtctcatctcttacctcctctctcacaacttagttccaagtgggcttaatttcttcaggttttccagcagtatgtatatactctcacttgtgggtagttttctctgcctggggtaattatctttccatacctcctaaccaccacaacgtccttgctcacgtctgcgtcctatcggctagaactccagggatcagcttaaactgctccatccagaaggcattccgaactctgaccttaaattccccttctctatacttaccactcttcatatttctccatcaaaatgtgtatatttttaatattgttattattagtactgctattttattattacttgtttaactctcctcccttctagaatgcatgcctcatgaagacagtgctgttaccctcttgttcactttttttgtttgtttgtttttttgttttgagacagtctccctctcttgcccagactggagtacagtggtgtgaccacaactcactacagcctcagtctcctgggctcaagcagtcctcctgcctcaggcttccaagtagctgggactgcaggaaggtaccattgcacctggctaaatttaaaaatttttttttaaaaacccaaaaccctttgcagagacagagtcatgctgtgctgcccaggctggtcttgaccgtctgacctcaagtgatccacctgcctctgcctcccaaacttctggaatgacaggtgtgagccactacgcctggttgactctccttactgagacttaggaagtctgagttggagaatagtggcaaggccagcaaggccagtgacactgcacctgtgcgtcagacagactctgagtcccccacagcagttcacctgccctttgcgtatgaagcagttacttccctttggagattttctctaacttcccctgagaggttacattttgtaaagtgctttgaaattccaaaggtctctcaagtttttatcagtataaagcactcaaacgtggctggaaataggccagttcttagtgtgggtaaaactcaggtataagtagttcaaggagtcttctttactccttgttgcagtggaatttttttcaacttggtaactttcaaaagtgaaatccttccctagggagaagcaaagtctttgtgcgttccctacaagtgtagtgtggatataacaagaggtgatgtggtcctggtggtggacaggtatgccttgaacctactgtccctttcctagtcccagcttgggaatgtgtgagaaagagatgtgtgtgtacacatgctgcacatctgcatagttggcaaaatatttgcaagatatctttacccttgagagttggagagaaaagggttatggctatgtccaatgctctttttgtgtagccctatggtgagactagtgtatctttctatacaaagacatataacatgtcaaattgtcattgttatgatctatttccatcgattggctcttctttaagaaaaataagtttattttggattttttggatgttatgtgagcagaagacaattttaacaccaaaatctttctagaaattaatcttcaagaatataaagtatttgaaatttaatagttcagtaactttgtatactgacataatttggtaaacatctaatacatgagtttggaaccatctaattctccacatgcattgaagtttataagctttgaagattctcctaaatttatgcttttatttctggttattttaagtcagttaaatttgattataattttttccttcaggtaacattctcagaggcaaatattacaaataaattgtgaatgtaaattaaaaacattacatagattttcatcattgccgaaagtatgcccctaagtacatttcctccttttttattgttttcttgtgctttgatattatgttttaaaatcattttatcattttgcttccaaaaaattcatcaagatccatgtttattagtttgaattttaatttctaaatgagatggtagatcataagtgctgggaagtgattgcttgaaattaacagagcattacactagcattatacttatgcttatgaggagacctaaaatattttgtttgcatttttgtgcacagataacgtgtccctgctctagactccccccaaaaaacaaacaacacaataaagactctggaaaccttagaatggtctttgacctgtaacaaaattttgactattagtgtaccacatttaattaataaatgtatttttattcttcttttgttccacatgtcataattcaagtttattcagatgaacacttcttttaagtgaatcctgttctaacaaaaaatattatctaatataaataatcagtgaataatttcagttttgaaatgtttttcaaactggagttttcagttattttatgcaggtgtgccaggccttaagcctgatctatgaaatgaaatgaagccaacttggacatgaatttttactttacaaaatagttccaaataaaaagcatcagaagagcagacttttaaactcagatacatctgagttcaaaatatgacttgattctctgtctgagcaaaatgtgtaacttatgacatgttagattccttatccaagaaatggggataatacctatcaaaaagaaaaggcaaataacatatgtaacatttgttgtggaaggtgaaactttacatatttaacaaattatcactgccatctctaggtatccaagttctcctagtatgtttaaaatagaaagtacataaatgggaacttgaaaacttttggtattacttccaaaaacataccttcatttaaaacataaactagttatcagaggaaatgtgaaaaagtgctcataatttttagaatcttgaacttctacactggtacttactttcctctttatattatttaggacatttaaaattgcaaattactgtgatcaaatctaacataagaaaaaggttgtcttaatattattgccttattttaaaatcagtatctggctctgcatagaaatgtattttctgaagcatgggagcaatctgtaaaaaatattcagaaataaaatcaagttacattatgtagagagggcaggcattgaaatagatatttttctccctgtcattagaaaatagaacatttccctaaacttgtatttttctatgggcttgatcaccttcctttcaacacttggctactttctaatggaaaatttccttttgaagccatgagggatttagtctgtaataaagatattacccagcaaatggaaagcagaccataacaaagtgtaaaaaattaagggctagtggaatagagagaactccttctttttccttttcagcatccaatatgtgtttggatctcaagtagtaatttattgaaacataaaattgaagctttatagtaatatgaggggaaatgtaaggattttatactgtagactatttttgtaatttcattttttaaattagactatttgggtaatacactttcatcaggtaatttaaacaattattttaagtgccttatagaatctgtgtttaaaaatgtgtatgaatgtgtatatgtatatatacacatacaaatatatatgcatatttgaaatacatagaattttatgtaaactaaaaagtttcctattgctcctcattacaaaaaaagacaccctcaaaaccaaaggaaccactattgtgtatcctttaagacttttctataaatttacttgtttacagcttgccattttaaatttaataatatattttggacttattttcatgtcaggtgggagtgtcttttaagcttgttttgctttccattgtatgtgtatgttttaatcttaatgctgaagacttttaaataaaattgaggcatttcttgcctcatataatatttattgaatgcctatcatttgctacataggtactagggatattgaaatgaagatattgaagttccttacctcaaggacttatatagcgattgttgtgttcatatacaaaaataatataaatatcgaagacatgttctaactgtgaatttagcaattcataccgaagaggagcccagtgactcttcatcagtctctataccagtccctgaagtatttcactcccagatactttgtgtgaaattatgtcttacagtaaacctgaaactcagtaaataccagcttgatttgaatataacaagacatatctgggtcagatatttcattatatcctctgcctacagtacagttgtagttgctgatgttttccttattaattattgagtgtctttggtattaagtgcttcaccttgattagcttctcctccttcccctacttccagtttttcctagttcagaataattactgaaacataatttgatctggcagtttattgctaagaattcaaagcctagaaggtaattgttatgtctgtctactgtccgtgaggcttgttactgtaatataacactgaccacaccgttgggctaagattaaaaacctgtacatggcctgacaccagagccccattgtggaacctacaatctgggtacttccatactgaagatcatgtaccacaatttttctgcttaatttagccctttaaagtatttacagttaccccataccatttaggacctacctcagactgtaacagagaccttacagtggcttaatcatgatttaggattatttggttttgactcatgaaaagctggttgctggcatgggtttagaagctcaagagcatcagggctgagtctttgtgatccctttggccttatcctcctggtcccaaacattaggagggaaaaaggcatggagaaaaggatggtgtctatttcaagaaatacaactttaggccgagcgtggtggctcacacctgtaatcccagcactttgggaggcagagatgagcaaatcacaaggtcaggagatcgagaccatcctggctaacgaggtgaaatcccgtctctactaaaaatacaaaaattagccgggcgtggtggcgggtgcctgcagtcccagctgctggggaggctgaggcaggagaatggcgtgaacccaggaggcagagcttgcagtgagcctagattgcgccactgcactccagcctgggcaacagagcaagactctgtctcaaaaaaaaaaaaaaaaaaaagagacaactttatcagaagtctttagtaagctcctgcttgcatcatttagaccaaaactgtgtgatatgaccacctctagcactgagggaagctgggaaatatagtgttttagcacattgccaccctgaacaaaacagaccttctgctagtagggagacaggagaatggatattctcctagcagcctctgccatgcttccgcatcagatggtaagcaccatgtgaggatgattccacatagtagatgcaatgaaagagagagatgtattttctcatctagttggttcacatggtgggtatactgtgagtctcaccagtgtgttgccaccatggtgattataatgcctacttggtgaatttgttgtgggaattaaatgaagtaatgtgtaaaacatctgaccagcacctggaacatagtgaatactcatggtgtttgatgttgttattagtagctcagtaaataatacttggtaggcaataaagtgtgatattagacattcacattaaatgtatacaatataattctatgtatttagggtatgcaacatgatgttatgggatggagattccccaaatcacagaatagaggaacccaaaattctgtgttaattgctaaagcaaatttatcttgtatttctacaccaaagcagtctctctctttttttttttttttttttttttttgagacggagtctcactcagtcgcccaggctggagtgcagtggcatggatctcagctcaccacaacctccgcctcccaggttcatgcagttctcctgcctattctcccgagtagctgggactacaggcatgcatcccaatgcctggctaatttttgtatttttagtagagatgggttttcactgtgttggctaggctggtctcgaactcctgaccttatgatccgcccgcctcagcctcccaaagtgctgggattataggtgtgagccaccatgcctggccacagtctttaaaaataatgtaaactctctatatatatatgtatgaaaatataagattggatctcttactctcttatggattgggaacaatctccaagagcaaaaaatcaaggctggctttctgactttgttaggttttaaacagagctaatgtctacttcccaagccacaactattagtatacattactgtaagtagaaggcagtctagagaacagtctaattgtgtttccaacccagctccccacttcatgtagatacactgctagctcagcccttgaaggtttttgaatttttgatatttgccttaagaatgtgaaaacagtagacctggacatttaatcaaatcccagactattgggctacaaagaattccttgatgcttgaaaaagcgtcagtttctgacaaatgccagtataattctcctttacacagagagacataaaacgttttaaattgtatggcttaaaatacaaagagtttcttgacaaattaagataagttgaaagaagctgcattctaaatcactgttaaatcaccgttcattgatgtttttggaagacattaaagtagaaaagtttatggtttgcatctgtattccaatagccacacagtgagctgtgccagatttacagttctaacctagtgtgtgttagcactcatatctgggttgattgtccatgggcttgagtaaagtaagctttttaggattattaatcaggaataaaaagccatggaaggatgcctaaaatattaatatctgtgattggtgagtttgtgtatatatgtatgtgtgtgtgtgtgtgtgtgtgtgtgtctgtatatatagaaactttgtcgatgatggagagtagtgtttgtttatgtaaggtgtataaattttttttgaaatatgctaatcttgaaaatttttattttccaaactaaggttaaaattattttattttctcttagtatttcattttgaaaattcgatatggataacccttccaggaattaaaagtttgccataatgaagatatttgttttatcattatgtagtgttttgaaaaattatgttcttattaattatatataatacactatatgtatgtcatttaatatgtagtgtattatatataattaatatagaaaaacaatgttaagtatttaaaagtatgtgaatgataatatagtaaattatgacagtattcagtggaatattatgttgccattttaatgcaatcatgacattcatgcaagtgtagagaatgtttactatatatggaagcagaatgcaatctctggagtctgagtacaagcaggcctactgagacagttaacacaaaggccagaggcaagaggccactgttttaagggatgcaaagcaatgctaaatggatggctgaagaatttaagttgggcagaatggtgagaaatgaccctggagggataaccaggacatagtttacaaagagtcttgtctgtgccatcctaaatatgcacttgttcacttttcctaaaatattcttccagtgtttttatgactgctttgcttcttcctcaggctatggctcaccaattactccttaagaggccttccccaaacacactctctgaacccctcgctctcattcaaacacaaacatgcgcatgcacatgtacacaatcgttactctttatctcactacccagggtacttcttttttagtgcattacaattggtaattattttgaatttcttaacttcttgtctctactagaatgtaagctccatgagggtaggggtaatctgttatgtttacagatttatatgtcttacatacggagcattcagtaaatgtctttgaataaattaatcaggagtttgaactctgtccccagcacctttctgtgctgtgtggtcttgggcaaattacttttgaatctgttttctcatttatgaatttgggatacttataccttagtttcttatctgagattataaaatgtgagttaaggtggtatacaaattcaagattattgtatagaaatacacatactacaaataaaattacaccccagtggtttcacagaagtgatattttatatatctacttggatactttaagggtacactgatcaaaagaatgtactgccctcaatttctcatacttacttgatttgcaaaagctgacctggagttaaaatattctaggttaacctgaacttgttagagaattaattatgcagcttttgtgagcaacacctgtagtgggttaagtagcatctcctaaaaagatatgatcacgtcctactggtatctgtgaatgtgaccttatttggaagtagggtttttgcacatgtaattaaattaagggtctcaggatgagggaatcctgaatttagaatgggctctaaatccaatagctggtgtctttataagagaaaggaaagggaaatttgagatagagaaacacaggggaaaccatatgacaatggaggcagagactgaagttaagccaaggaatgggaggagccagcagaaactggaagaggcaaggaaggtctcccccagagccttcagagggagtgtggctctgcagacaactggattttgaacttctggcctccagaactgtgtgagaataaatttctgttgtcttaagccactaaataaatgcgtgtatggtactttatgtcagccctgggaaatgaatacagtatcccagatattttaggtttattgaaaaccaaaagaagtttaggcgacagcttccatttttgagctctagctgtatgtatgatgagctgctcactctcagtttagagcagaagaactattcacatttataagaattccttcaattaaaaaattgaaataaggtgcttaggggattaggaaaaggaaaggagttttttgtattagaattgttaatgaattatgagaatgctatcaagtaaaatgaagaataacaataaggaaagactttttgttactttgtgtgtgtgtttgctaaaggtgtgataatacattttggcaggattcccgtctgagagattggtggctctgtgtattttatccacagcacagagattatctgactggccaaaggcctcatagttcttaggcactagagctagaattaaaacccaggactctggctccagacactttcctattttcactgcacaaggctgcctgaaggacagtcagccacgatgaaaggacagtcaagatgaaagcccatggctcacccaggtctacatcccaggcagaggccttggtgtcaggagtgaggccaccctccccctcagggttgctgggccctccctggtggtcagaacagcaggtcacggggaaatggtgggggctggtctttgctggccacatttcccatcatggggacccagaaaggatgttgagtgaaagcagctgttgtatataatccatggtgtataatgcctaagtagctatttacacttcaaatttcaatagggttcctctggcaaatttgatttttccagagaacatttgtacaagttaatgtttaatacttagtcttataatccatgaaaaagaagggttcttagatctttaaaaaaaaaatgagcaaaacatcaacttctataaatttagttgtcctttatatgcagaagtagggattggagagaaccaagttccctttggtaatatacttactgtgtaaagaaaagtttagtaagttaatgaaataattcaaaattgctttagaattattcagagtttattagagtgtaatgttttcagctaatcattttacttcatgaaatacattaaaatggtctgttgtgtgatttttaaatgaattaaggaactttataggaacctgttttcagggactcatacatttttgtccctatattattattcaggttgaaaaacatcccaagtcatggtatgaaggttgtgcttgtttttcatagtttaatgaaactcttctcctcagcttatttggttgactatagaaggaaaataaatatttattgcttttgcaattaaaacattcaagtaaagcttcagttacctttctaaagtctttgttaacaagaggtgctttgttataaaaagttgatggtaatttagacatgtacagaatggttggatataaatttttctcaaattgccttgaaattttaatggatgaagtgaagaaactttgccccagggaaaacacaactatttcaagttttattactcgtaagtactaacatatgaatttttagtctgtttatatatgaaatttatgtgctgctttatatttatgtgatgtatcatgaaatattgcatatgataggttcagtacaactttggtgttgggattattccagagagctgagcatttgcttaaaattcaagactattttgttttagacatttggaatagaaatctgtctaaaataaattgcccattttcctgtcttcttaaatagatggtactgaccaaaacctttccttgatgaatgatcacactatggtttattttaagctctctgggagcttagttgcttttgtaagcatagtggaatgccttgtcccaagtatagcttccacctctagctgcctgtaagtatactgagggcaggattaacatttttaaattcccggcacatccagcacaacacatggtcaatcattttacttgaatgaatgaaaccattatgacaaaatatggtgccccttaggatcagctgatatatttagtgttctttgccatcataataacaccagactgctgttactgctacctgctttggggctgttatcttgtctggcttgtatagctcaacataacataacataccttcttactctgtcatgagtttggaatatttcattgagtatggttcaatattatgtacaatgagagcaaataagctctaatagcctgacttggtatctgtgtatgaacacgtttagcacacacatttggtattatctgcttcaatcacagaagtctattttacttaatttttctgccatttgcttcagtccttttcttttgagaagtgcatctgttcaggttaggataacccttgtggtacagttgtaactatgactccgtgttgccgtgatccccaccttattgggaactttaactgatgccatgtttccagaacccagagtgaggattcatctagatggcttatctcattgctgccccaaaaaagtccatattctagaggatttaggggcagagccctaaatcacaagccataagagtaacatttctttgaagttgtatgttctttcttaaaaattaatgccaatttagagtttatacatactaattaatatttattttgatgtaaaacaatattttaagtaactagtgggaaaacatttcctctctccacacatacacacacgtgtgtatttaagtacatatcctatttttttttctactgttactctcacctcccccatcccaacacacacattggttacctatcattttaaaaactttgagaatgagagagaggtttatttccaacccaccaaatcctggactgtttcccccactacattctgcttgcaaactgaacaatttcgtctttagttgatctttttttcctccctatgcctttatcataggtagaaaccagattatattttcagcatcctgtctagaaatcttcttagccagatctataagttcatttccatctttcaagtaatctcaggcaaaaatgttaccaattatttcaccacaataaactgttctttccccagattatctttctataatttttcctgcttctgtgtagtacccagttccaaaactgatgctacatgtttttaatttttattttttgagggtcttgctctgtccctgaggtcgaagtgcagtgatgcagtcacagctcactgcaaccttgacctcccaggctcaagtgatcctcccaccttagccttctgggtagctgggactacagatgtgtgccaccacactctgccactctgctatttttttttttttttttgagtagagttggggttatgttatgttgcccaggctggtcttgaactcttgggatcaagcattcctgctgcctcagcctcccaaagtcctgggattataggcatgagttaccatgcctggttgttttgttttttgttttttttttcaagatagtactgtactttctggtaccaatttctatattggttttctgtttctgcttaataaactctccaaagttattggttcaggcaacatctatttatttgctggtaattctgcagttttgggtgggcttggctggacagttttctggatttagctgggcccagtcaggcagctctggtcctctgatggcttcactggggctggagagtttcagatggcctcattcatgtggtgggggccccagtgctgggcagttgctaggcaggcccttttctctctgtgttctttcactatttagtaacctagcccaagctcctgaaatggcagcaggagtattcaaagagcagaaaggtgagagctgcaatgccctttgaggcccagtctctggacacacacagtgtcacttctgcctagccctgctggccaaaataagtcacaaggccagccaagacacaaggggtgggaaatagacccctcgtctttatggaaggagctgaaaattctatggccatgtgttttaaaactaccaccccaccattccataccttcagagtattccagtcaagaagcgaaaattattcaataatgttgattttctagaccagggatcacaaactgaatgcttcagtgtgatcattggcatgtttaaaaaacaacccaacatttcagcatcaggaggttttaccttaagctgagtcctgatttctgtcttcttattaacaaaatggaaatcctggtaataccgggcttccatccctgtgtccctgaggagctggagctaagtaggctgccacctttaggtggggcgtgtcttctttagttcatcaccgtccccaccactgcccattcacttgggcaagatccccacccagctcccaaggtatctgagccccgtgacagctcctcattaatcagggctgtgaatcagaatcatttgcaaagcttttaaaatggcacatttcagggatctacccaagacctctggagttctatttgctggcaagcgcagtttgggtgtaagcattttcacaaagctttgcacgtgcttctaatgtacacctgtcatcaagaaccactgatttaggataatattcccacagactagtgtgaatcattgaaaaatgactgtactttaaacttatttccctactaaaaaatgtcaggtgcgttcacatttatttcatttcccttcccaatttctctgtgaggaaagcatgtgatgaaacaaagataaggaaattaatttgtgaattgctgggaaatctaattttgtctcctgaaactctaccttctccatatttcaaaaaacaaaaacaaaacttcagcatttattacagcctgagggatcttgcacttgtaggaaacttgtatggaaacaatacattttagtaatgatccttttaccagcacctgaatgtctacctactgaaagatatatatataaaaatggaagagaactgtgaacattagcagctgctgactacctatgaaagatactatggaggtgtatcattcaccacaaaaccaaggggaaagccttacattactttaaaaggaccagaaaacatgcatgtattttcgcagatgtacatgtctcagaaagcagcttctgttacagtattttattttggtaaaatacttttacaatggtcaaaattatgttttttagatatagtgagctctaatttgagattttttagaaagaaccatgtttccttgacctgccttctcagtcttggtagccagttctctctctctgttcagtacatgttcatagagcagtaagtaagagctgagctagctctgggggaccagcagagcatgcctgccctcagtgagtgcaagtgccgtggaagaaaggtacagtgagaaaagttacagtgcagtgcaaatgccctaagagagagttccgaatcactgctttagaaggcagtgggaaaaacacaacttcaatcttgcttacagcaaatatttcagagacacttggtttcctatagtgaattcagtaaagtctgaaccttaaaaggggggtaagcacattattatcttttctatttcatattttaggacattcatagaacacccgaaatgataatatgatgtgaaatgattgttaaatggtttctttagaatttctactcatggtctatctcttctaattcaagcttctttgttaatatttggtaaatggatctatttgtcctgtcagatcttaagtatattttggaagctgtgtacgttcaatagatttggctgaccagattcttttcaggtctttgaaatattaccccagatttcaggtgtggtgctttctgtttaaaccaagcacttggtaatagttattaattttgtattgaaaaaaaatttactatcttgaaatacataaagtttttatttctccaaaggttttttttttactacgttattacttgtaatgatttattgtataaaaaattctcaagtctctagtgaaggagacatttgactttcttttttttttttttttgcaatggagtcttgctctctcacccaggctggagtgcagtggcccaatcttggctcactgcatcctctgcctcccgggttcaagtgattctcctgcctcagcctcctgagtagctgggattacaggcgtgcatcaccatgcccagctaatttttgtatttttagtagagagagggtttcaccatgttggccaggctggtctcaaactcctgacctcaggtgatctgccagcctcaacctcccaaactgctgggattacaggcgtgagccaccactcctgtccttgatcttttatttaaatactacacatattacttattagtatgtgatttgtcaacattctgctaaatttggatcaaggccatggctttctttcctttctctggggagcagaaatatctactttacatgctccaactattcaatggatggatgaggttaaacaaaatagtatcaaggccaaagacagtatttgtaagaattatacaaatgctattaaaagattttctaaaattaagaaaaccttgatttttttcatattattgtagctcactttaaatatgagatgtacaattctgactcacagtgagaaatagaacagaaaaccgtttgtgttactcaagcactgttacatgtcatggttctgtgaaacagattttataagctttgggatctaacaagaggctgagaccctgtttggtttataaatatgtgtgggatattatttaggtcttcagaaataaaagcagagaatcatttccttatgctatcagttcctctatgggaaagcatattaaaatgtagaaaatataatggtatataatttagcaacataatatacaatgtgggttgagagacaattacagtgttttatttccctatactttccattttaactgaatgcattttagcaacaattggtttctggctgtaacattattttagctgtttcataaagctttatagcaaattactgtggtgtaccagataaaataaattcccgacttcactcttaaaagtcatattatgagcagacataattttttacttttataggtaagcatgtattttataacaatttttggggcctgtcaaaatctgagttcaggattgctgttgctaacattattttagtggtttcctctgtatttaagattaagggttcattttatgcaacaaatcaaccgtcttatgccagtttggttcatagtaagctgatgtatacagtgctgaattctggggtcacacatcaccaagtaaacagcagctacttgaatagaaccttgttgtatttttcattcacacagtgcccgtagtgtactgtctccctaggcagccctaccttgccctcctttcaggtgattctggaactactctttggcccttgtgaatacctttcctgcctgccaccacccagaacatttgaattcttgctaccgtctcacacttcttacctaaccctaaaccccatttgggcatgttttcacctgagaatattataactccaccccaagatacttttctgtttggaaaagactagagaagaatagaacaaacattcatgcattcatctctcagatataattgtcaacattttgcatatttcctgcagactttttttttttaaggaatgtatacttgaagggttcctgatcatatttcccgcagactttttttttttttaaggaatgtatacttgaagggttcctgatcatatttcctgcagagttttttttttttaaggaatgtatacttgaagggttcctgatcatatttccttccctccttgcccggacgttacctctcccctggtgtgtccctctccagtctatgttttatccttttatcatattcctatcagtctgcaaacagtttgaacgattgtattacacgctcttaaatttgtgtatataaaaggtaatgattttaaaagttgaggcatagtgttacagtcagattttttcaatagtctgatgttctctagaattttgatctcacaattcatgtttctctttatgcctttagtattaatatttttgtccttaatgctctgttatagtaaccaaaagaatgccttttatgaatttaaatgaaataatgtatatgtaagacttgataatctcggtgtaatcacctatggaatgtatagaagatataagatatatttttatcagtcaaaaaaagtgctttttggtacagtttagtttttaaattctacacagattctcttattaaactggcaccttcttttaatgagggctttttcctgtaactattaagagatgaaagccccatctcactccataaaagtaatactaggagataaatgaggaaagaaacgagcaaaggacaagaagacttctaaaagtacaaaaaactcagtatgtttttaagtactgtatatactggaaagaggagagacggtaaattttccaaattactatttcgaaaatagtgcatttacctttgaaactcttacctggtgaatcctgagctgaacaccttttacccgtgtcctatagcattctggcaaagcacctgccatctttctattcctacacaggtaggccaagttctctctgcagtgagtcccttttttttatttttgttttttcaacctggggccttgctttttctgcaaggcctgaccaggctcctcactgctgttaattacaagttggattgcttcaaaaaacctggttgtgtagctgagagaggctttcctttactcttaagaagagccaagtgtaatgccttggtagatgaaagtggaaatttgagatgaaagatagccctctatgttgaacattgagttaattgaggtataacatgtgtctttacaaaattgatacatagcacaattaggtataatctggtagccaggcaaagctttctcctgtaagctagcaggctgtagggtgtcctgcaaaggcaaagtgtatgagagcatttgtccctttccaactgcttgctatggatagatgttacccaggtcccttaagtgaggttggctgatctacagaggagtagggaaagtacaccttctcctctgggtcttctgcaagccttgcgactaaagagtactttccaattgtcagccacccctactgggtcttctcacttattacccttttattagtatttgggcattccagtgactaagtgataaacaattttaagaaatagattggttaattctgaataataagtgtttaatagtctccccaacttattatatctaagcatttaaaaaattttctgtctgattttatatgttagaattgttaaatggttgatatagtttgatgtgatgatgtgttgtgatgtaaatatacctttggaagattgaaatgttcataatttataacttaggagagtgactaaggcagatgcattctctccacataggttgagcatttcgaatctgaaaataggagatctgaaatactccaaaatccaaaactttttgagcgccaatgtgacgcccaagggaaatgctcactggagtgttttggattcagatttttcaggtttaagattttcacctattaagtatgatgcaaatattccaaaattttaaaaagtgtaaaatccaaaacatttcttttccaggcattttggatgtagcatgttcagtctgtactttattgttttccctaaaatactggatttttattgacttgtctaatattcagggaaaaagtaagctaccctagcatgtaaattattttccgaagccattttctcatttcaacttattagaatttccaaacaagacacaaatagagaggaatgtctctggaagaggtggcagttcagaattcttgggtagctcaagaatgactctaaacaaactgacttattagaaatgcagtgtagtggcaagattttcagtgatgtgttcatattctgaccaggtttctggccacaaaatatttgatggtaaataggtagcaggttgtcttgatgttctttgtaccacctgtaaaatactgcttgctccacatttcataattaagacattcgtagttgtgtagaataaaaacatatccttctgggaaaacaacatgcctagttcatatattggatgatgctgtcactgttaaattctttgggattaccacagttactgatacaatttgccacatcttttctcaggatacaaccatttttaacactttatgcgttgagatgagtgtattttacagggagacatattgttatcgcctccagaaccccctccctttcagcgattttgtcatgttgctttaaagaagttagcattcagtcagtgcttggtctaaacatgtgaccaaaacaatttgaagcatacaattgagagtatacagttgtgattttttgtttttgttgttcttggagatatccattaacatgtgatatatccataaaaaataattccagctgtatgtaacagaaaactcaggctaaagtggcttaatcaaatgggggtctccctttctctagtttagaggaaggcagcccagggcaggtaggtagctttgtaatgtcgttggatctgaggttctttctgactttctgttcagccttctttttggttgttcagctttcatcctcatgcttgttgcctcatggtggcaaactggctgctgcacctccaggatccttgaaggtagaagtcagtgaaaagtcaaaggtacaaaccaataaaacctgctttaagctttctgcaggaaagaaaagtcaaatccgcttaaagagctttcctggaatctccaactggtaacttccgtttatatcacattgaccagaagtaggtttctttgccatccataactgcagtgaggttgagatatttagtttctcagctgagaaatgttgctctgcacaaaactgggttaagtcactaagaaaaaaggaggttaggactagactagacaggcacaggctgaagagtccatcccacagtgcctgtgtgccagagactgcggagtagagaggccgagatgaagtccaggaagagggcatgtataagagaatgacatttttttctcactgatttaagagcaagacaaaactctactattaggaacaaagggtagaaagaagttaacattctgtggtcctttctcttgaaattgaccacagggaattcttgaattacagcaatttgtagtgtaatagaaattttgcaggccctgagttaggcgaccgcggggcctgaccctagatctgccaatatctgactttgttctgctgaacaaatcgcttcattcttggcataagggtttcctcctttcagctctaaaatgagggcgttgaactcatcactatgatccctccaaggtaaagactttttgattatctgagtttgttgtttacagtttactcggtttgactccaaatccagctctctttagacatccccacacgtgaagttggttaatcatagtgtttgtggccatttttatgaaaaattaccatcaggttacttgtttgccttagttgtttgtatggaaagctgaggtatgctcgttttcaggaatgttacccttttgagatttgcctgtggctcagacctgtgaccacacaagggagtggccctgttaattttggtgttaaagttggattttattttctgaaccttcatgttcagagctgtggagagaggggagaggagtcctcaatttcatgtgagtgaggggagtttattcccaggttcattgtcattggtgttaaagtagctcctctcctgggggctgggaggaggagggatttagagtggtttccatcttgcacacaccaatagcattcctctgtttgtgttggcattccagtacaggaccaccttgggtcctccccttatccctgtctgtgcctccagcagagagcacctctggcacacccacgtatctgaaataggaagatgattaaactgatgacaattgctccatctttagtggcaaaatgtgcctgaaagtaactcaaggaggcagtggtggtgtgaattcagataatcctgagtaatgatgggaaggaatgtgggggtcttgcctcagcaacactttggtcaaccttcgaggttgtagcaggtcctaggggctgagagcagcatagggtgtctgtggatgcaggtggcatgggggagtatgtgcagctgaggtgcaggaggaggacctctgtggagattcttgtttaggatgatgaaattgtatatctgtctttctctctctctttcctcctttcctctctcccttgcactttctttcaggctttaagttagtatttcattctaaggagatatatctttgtgttcagttgaaaatggtggacaaaaattttggtctcttaaggcatttgcccttgaataagaaaaaaagatttcagttagaaatctgagcaacctgaggtttctgtatggaatataagaggagtcacaatgaataattaagcaagttatagctaataaaatatacagcacattgcttcaaactaaaacattctaactctacctcagggatgaatgcttttcattattttttaattgttgccagggttgaccttgaaggtcttgtctggcagataatttgttatggtaagaatgagatcactaagcattttagatgacctacatgatgcatagagtttcttcctattatataatggtgatgtgataagtctgtttacttgggaatttattcattcatttggatggtattttatttctcagagcccctctttggcagtatcattgttgctgtactacaggaagatctccttagccatgatgctgatttctgagctcatgtcatatgcatttttaagtgactgctgactcctgatggtccacaaacaccagaggagcaattatccatttggacaaaatggacatgggaagatctaggacatactttctactcttaggaaaatggtattctggaagatcattcttacatgagtagagttgtacaggttttgtgctgatggcctagttatgtagcctttgttactattcagtcttcctttgcagctactacaggacctggaattgcagagtggttcagtaagcctagttactgatgttttttatagttgattttgaagagaaatatggtaaacagtaattcaaggttgtattaacttaattcacttttttccatttatattgtattttatgaaggacagttaatagaacattctggctatagaatgataaacgcatggggaaaaactgtaattttcactaaatagaacaagaagaacctgtcgtattgggaaattaaagttagcaaatacagtttcttgtttgtttggaatgtgtactgaatcttagacttgagtattaagttcaaaaccatatgttgttgatatgcatagtatttgtggggtttatgtgtacaatttgaaaaaaaacaaattcttatttgtggattgtaatatatagtatgtctttgttcagtattttctcttagaaaaaataaagcagtaatacaattctcatgatactctcttctggacaaagaaaatccagtgtgctgttaaataaataagatttatactgtatgagacatatataagaataagaaataaaatcactactaagtattctcatattgataatttgaaaattatcaattttaagttgaagaaaattttagttcctattactgtatagaaaatatttataatttaaaaatatttttggtaatagaaaatatgaatcatttattataaatgatcatttaaattctattttgaacatgtagaaaactagatgccaagtagagtctacataaaatgtattgttttttcttcctggtaattgccagtgaatcctggttcttacaaaccaacaaaaacccaattattttactaaatgtgtagttccttattgctgccatccaattttaaaaggtgcttttttttttttttttttcccctgagacagagtctcgctgtgccctgtaggctggagtgcagtggcaccatctcagctcactgcaacctccacctccctgattcaagcaattctcctgcctcagcctccagagtagcagggattataggcacaggccaccttgtccagcttatttttgtatttttagtagagacggggtttcaccatgttgaccaggctggtcctgaactcctgacctcatgatccaccctcggcctcccaaagtgctgggattacaggtgtgagccactgcgcccgtccaaaaggtgcttatttacagaccctgtgaagttaaactgtgtccttggattatagtgttaaagttgtaaacttagaccatttgcactggtaatgttagtttacattttggtatggtaaattcctactcaagcagctgttgtttaacatttttaaaacttcataaaattgcagcaaaggtatcatgtttgatttcagatacagtacattcaaagtattaaaaacccgtaatttttaaccaagggcaaaagtatgaaatcactctaacaaaagcaaaaatctaccagatttctagggtactacaaactggagcataggaaacacataaagtaagttgtcttgattttatataaacataaaacacctctttaatactgtagacttatttcttcttaatgcctgatgcttgattttttccagctcagaaaggaaaattctaaaaaatcattcaaaattgcagctttaaatcctgttatagctactttttatgtagtataatgaaacatgtagtgtgatgacatttcatgctattctacatgtcacaaattaagatatcaagttgtgaatattttatttttctcaggtttattttgagattattttgagtgtttttatctaatttataggacttatttacactaaggataaattatatttatttatcgttgcaaactggattttattttccgtggtttctctgatgaaattgaggcatcagccatttacattttttaaggattgaggtgctggcagatctattttttattgcagagaagggatagtaccattctactgctttatttgtaactcagcttccttcgtgagatcctgtttcttccttttaatattactcaaagtgacttttactttactcttttctccaaaacagatctcttagttgacagtaggtaacctacacatagattgtgttgtaaaactcagtattaaattgattactgctatatatagcattttttaaagaaaagatgttattaattaaaatacctagactagcccttttaatgtatgatgtcatggaaattatagacattaattttatgtgctataaacactcagttattgcatttataaaatatatatttgatacctttcataactcccactgagttacttgtagcattgtggttcagtggctttggagttgaacagatctgtgttcacatttaggcttgcttactggttggttttgtgagcttggacaagtacaatagcattagggtcttgttgtgaagattaaaattaatgtgcatgtggaacagctgttacatagtaagtgcttgattaatattagatattaagtgcacggaccatattcttatttttatccttagctcctagttcagggtttggcactgaggaggaggtgaaataaatgttgaatgagtgaatgaataaataataactaactcattagagatcctagagaggactgccactacttttctgccttctaatttggagattgttctctttgacttgactcttaacttcataaaggcttatgtagaagggcttggccttgtcctcagtcagccatgctggaagcctgagggtcgggcttgattcttcagaatcaagcttcttttacgtaccggtgaatttaattgcctacactgatctatgctgtgtctattgggtggagggaatggtcaggaccaggtttatataaaataggagatttgtattggatctaggtaaatgacagtggtgtgggaaaagaaaactggagaaaagaaaattctaggcaaggagacttgcatgaacagatgcatagagggtgaaggtatattggggtggttagaccagaacatctgaaaaatacacacaagcgttaacagagctcaccaaatgggtttggtactttcagtggaaaaactatggtatcatttactaaatgataaagtgagcataccctgagtgagttagtgatcctagactgaatgaatttactgttgccataagcagtactttgagcttttgatttctgattttgtgtttttaaaaataaaaacattttgattgaattttccatgttttaaagattactctacacatgaacttttattgcacagatgtcttgttcgtcatgggtgtggacagaaatatattttgtcatatgggagagtatactttctggtatctaaattaataatgaaatgtttctgaatataattcaagttaatgttttattttggtctagcaagtagaagggtcacagaagtaggttttaaagcatttagaaactttaacaagtgaggaaacagtgattagcatcaggacatttttctagagaaacagtacatggcatttgaacaactgggctagctcacttacaccatttactacttttgccataagatattgaactgctttttccagatttattcttatcctaatgttcttcctctttttttttttttcttttgagacagggtctcgctctagtgcccaggctggagtgcagtggtgtgatctcagctcactgcaacctctgtctcctgggctcaagcgatcctcctgcctcagcctcctgaacagctgggactacaggcgtgtgcaaccatacctggctaatttttgtatttttttgtagagacagggtcttgctgtgttagccaggctggtctcaaactcctgagcacaagcattccacccacttcagcttcccaaagttctaatgttctcttgattaacagtttttagtaatgcaggataaagtatatgtgtattatatgtgtataaaattttatatcagtgtgtataatttttaaatattatggttttttggtcacaaaatactgattaactgtgtataagtctgttaatgaggtctaaatatgtaagcaaaattatacaagagttttaaaaactcatcattgttatagcacttgttaggtcaatctaaactatacagaagaactatgcttctaaaaatctacatgctgaaaagatgctcagcatcattagtcacagggagatgcaagtcaggaccactgaggtaccacttcgcgcccactaagatgagtataatcaaagagacagtaacaagtattggtaaggatgtggtgaaattagaatgttcatgcattgctggtgggaatgtaaaatggacaacagctttggataatagtctggcagttcctcaaaagtttaaatatagaattcccatgtgacccagcaattgcaagagagctgaaaatatatgttcacacaagaacttgcacacgaatgttcatagcagcattattcataatagcccaaagatggaaacaacctaaatgtctatcaactgatgaacggatacacaaaatgtggcttctctttaagagtggaaattattgaaccataaaagtggatgaagtactgatacatgctacaacatggataaaccttgaaaacattatgcccaatgaaagaagccaagcacaagaggccacatagtgtctgattccatttatgtgaagtactgcatagtttcttataaaatagttgtacaactttgtgaatatacagataatcactgaattacacactttaaagtcatgaatattatggtatctgaattatatctcaataaaaaacaaaaaagtctatgtgcatttataatactacagccattatatttaccctaattacattttttaaaatatacctaattttcccttatacctttttgaataatgcaagaatcatttaaatgtatttttatgaactttttaatataatccttaattttagttttccaaattaggtggggatagaggattagttgatattaaagtgtattgaaactgaaatatggacttaataagtgagcatctgtgaggaagaacaagatcagaggccaggtttaatgttatcctgcttcttattatcgttaagctttgaaaatatattttctaattatggtttgaaccttttactgcatctcatctttctctttatcattggcatcattagaaaatggaaggtgcttatttattagctaatatgacacaattttgtttttctctcatttcaaaattggcctattacctcttgtcaactcctgtttctgaatagaagcttacttttacaaatcaatggttccttagacccctttggaaattcagcttaggaaatctcctggttccatgttggtgcttctccacaaccttgattctctcttcagatatatcctggctcatccccggtgggactctgggaagggagggtgagcttactgtgcatgttgccgttctgctttgcagttctgctctgaccatttgcacatcatggtttgaatcctttcctctcatcctagtggggaggtaggggagcagctagctatatgcctgacaggattcattgatgaatttctaacgacttcaatttgagcatttctggtatttaaaaaaaaaaacacttgatttacatccctaaattgaattatttaaaaaattatcttaagaatatgcacattctgaaagagatctagattttctagagggttaaatttagacgtataattatgagatcaattttaatttccagtccttttttagtagtgcttaatctcttgttagtgttgtcttctagtttttaatcttcatgtatcatattgtatgctcttttgtaacttgctttgtttgctcttccttcttttgaagtttttgctggtacaggttgacttagtgaatttgttttcattgctatataatattctattatttgaacacaattttgtttctttcgatgaaaattctttgtaatctttattctaaatcatggtgcaatgtatccttttatgtatttctgtgtacaaagataaaaaatttctctagtgtatgagtctgttctcgcactgctataaagaaatgcctgagactaggcaatttataaagaaaagaggtttaattggctcacgattctgcaggctgcataggaagcatgacagcatttgcccagcttctggggaggcctcagacatcttaccatcatagcagaagataaagggagaagcaggcacgtcttacatggctgaagtatgaggaagaaagagacaggggaggttccacacacttttaaacaaccaaatgtcctaagaactctatcaggagaacagcaccaaagggatggtgccaaaccattcatgagggatccacccccatgatccagtcacctcccaccaggccccacctccaacactggagattacaattcaacatgagatttggctgggaacccatatccaaaccaattcagtgcagggtgtgtatatttttttttttttggtggaggtgggtgtggggtgtatatcttcattgttttatacactgttgcccagttcttctgcaattgacagtcctaccagaagtgtatgagtcttcctcatttcacattcttgctaacactgttattaatttaattttttgctagtctgaaggggatgaatgttttcttattgttatctttcaattactttttctttcttaagatcccccgccagcccccagcaaccagattgtagggaatttcaatcttcctggttcatactcattgatattcctataacaacctctatggctcatgtgaaggaaccagtgattaatcggagtggaacatttgatgaggtccctctggctttaagtttacacttatctccctgtatatctggcatgcctattatctaagtctgggtaaccctttgcattgacactaaggcttccatgccatgcttgcccggtcttcatttgtaccacacacccatttctttctcaggttctgctgtctcccgggaactgggaggccctaatgcttatatccccgagaagatctcttctccacctgccaccaaaggcaaggaacagaacaatggaaacagaacagaaataaagtctcaggaaactactctactgcagaagtatctgacattgccttggtgattcctctacttagtattcaagctcccatgagatgcctcttccaggctgtaagagtttatctactctttacaaatgttcactgtcctgctgttatgatgattgttactatgatataggacactacctcaaaaccttttttctttgcatcatttcccagctgcctactgctttgctgcttcccccaaattcatctgctttttccttaccttttctctttcacattcttgccagttgctgtgccccctctgccactgagccaatcccttgtctcagtttgtggacagcatctatttttaaataaaactctctttgctgtcccctacttttgggaagagcttcacaataattgaaaagacatgtttattccataggaaacaccatcattaagttttcttctccacattagccacaggctagtgccctcataccatgcaggtgtggatgccacattcacctcctgagacactttccttgaactcttatctaaaattttatactcttcttcctgccccaaatcacatcccctcattcctcgtttattttttctctttagcaacaatcactatctaataatctatacatcatatgtatttacctttcttttgtcttccttccctaccagaataaaatgtcagtgagaaaactaaaagttaaattagaaatatgttgtcttttatattggtagtcaagatttaaaaagtgtgacctaagcaaatatgttaccccagatataatatgtaaagaaattgaaatattagtatacttaattttaatttccattttatttgggcataatttcaaaaaaagtataactttgaggaaaaagagtttttgttgttgattttaatatgttggttataaaactaagttttcattactgaaaataaattaggaatatcctgtattaaagtactgattgactctctaatataatttttctgttatttagtctatttttaaaaatttctaataacataaggatatgtattaaatcttaccaacaaaattttagttaaagcttttgtttcaggtttagctgcccttggacggcagaactacctgtactgccaaacatcatgcttaagcttttgaaattctaaagttaaaactaaattaatagataggttgcatttttataagtaaaataaatgattactgaaagtttaagctaaaactcttggagctctctcttacccttttaaagactcatttggccatattttgagagtcactgaggacagagaaatgtaaaaaggaaagggtctattgcatgtggggctacattccttctttctttctacaatatttgaaacacacaaaaccagcagcactacactgagccctttgttcttcctgttgggcaaaacactagatagcttactgtaaatatggccaactgccaagctgtggcgcagattcttttttttaaatactgtaaactggcacaggctcaagaattacagttcttccttccttttatttactttctccttctacaccaaagagtttcatctatggcaagagagaaaaacagttgttgtggttaaaatgcccagtcgtcgtgggtttttttttttttttttgccttactcctgaccttgaatagatttcttttaaaataagcagaataacgttattattcttaaattttaaaagagctatgtcctttcatgaccaatgtaaaggactgaagtagaaaagtgggatgagaactgagttgaattcataatatttgttaatagcattctactttaaaaattgattttgtattggtgacttcctaattctcttttgttaatgtcagagatattatcttggtttcacttatagtgatcttagaatactttggtcttagatttcatttttaatgcacctgcattatttttgacattagtaacttgcttccccttgtgttggaatttgtatggctgcaactgagttgaaaagaggcacagggaagggtgcggagttctgcttttcagctgtagggtgtgtctcttttgaaactgttttttttaattcaagaaaaagcttggaaattttgtattttttgaaagaattatttgctatgcgtattaaaatagacgagcaaaacaccaaggatctgcattattaaaatgacatgcctctcacaaaaaagagagatgtcagaaatcagtagatacatttttgatgtaaataccatcttgtcaaatatattttaaatttttgatataaataccatcttgtcaaatactttaaattttgcagggtttttttttttttctttctttgagatagagtcttgctctgtcgcccaggccagagtgcagtggtgcaatctcagctcactgcaacctccacctcccgggttcaagcaattctcctgtctcagcctcccgagtagctgggattataggtgcccaccaccacgcctggctgatttttgtatttttagtagagatggggtttcaccatgttggccaggctggtttcgaactaccgacctcaagtgatacgccaacctcggcctcccaaagtggtgaggatacaggcgtgagccactgcatccagccgattttgcagttttattgatgaattttgtacagggaaacttctaggtctgagtagaaattaaatgtatattgtaattattttttcaaaacatcaaaataagattttatttattgtctttacccaatgcactgaccattaaaattattttatacagtagccacgtgacaacatatttactttttcatttcactcattaatctgttttcttttaagaaggaaatctcactagatgtaaatacaaggatatttgtcttgttttcagatataatgaaaagtagagggtgttatgtttataatcagattttgtgtcagtctttttgggagatacagggggatttcagaaagcacaggtgattaaccagagatagggagcctgcttctactaagctgctctaccagttactgggatgaatttttcagtagtgtcatatatttttaattttagggggattttcattggactgattgaaaataattttaaaacttgggtaaaatattggctactttgcctcagttcccttacacaaatgaaaatttaggttattatactgaggtctgagcatccaggaagttcttttatacattgacatatataattaacaattgttattttttctattttctctagaattttcatgtacagtttcacctgtatactggataaagttattaagctgggagttaagaggcaagcttcttaccctggccttcattgaataataatctgaccttgaggatattgagtctttctgggcccggtttcctcatctgtgaaataatgagtaggactaggccttcttagaagttgcttccaatgtgaagagtctagacaaaattctatgattattttgcctttttaagagactggaatttatgaataatgagaacatgatattctaatgtagtgaatatttaatttatattcaaagaatgtaggtgtagagtgttgcataacttgaggaaatttttcttgtatccttagttcccactgattttaggatcatttttcttttatgataggctattgttatttgatatcattcatagagagaatgtgagtaaaaatggcttacagattaggatatttggtaattctgaagatgttccagtacagataaaatctagatggaggataccatttcatatctcaaaaggcagctgtagaggtctgtgcaaggcttggagtgcagacctgcatttaaatcctggttctgttgtccaagagttttcattcctaggataactcaccaaaatgttctgattctgaattttcttgcttctagaataaggataataggatgtctgtttcacagatatatcctattaactgagtttaaattagattgtgtgtgtgactatacttaacttcaattttaacattaaaaatgtcatcctggccgggcgcggtggctcatgcctataatcccaacactttgtgggaggccgaggcaggtggattacaaggtcgggagatggagaccatcctggccaatacagtaaaaccccatctctactaaaaaaatacaaaaaattagccaggcatggtggcacgtgcctgtagctccagcaacttggaaggctgaggctggataatcgcttgaacctgggaggcagaggttgcagtgacccaagattgcgctactgtactccagcctgggtgacagagcgagactccatctaaaaaaaaaaaaagaaaaaaaaagtcatcctttagttcaagtcagcaaacctttgttgggaatccaaggtactctgcttgggagaagcatatacctacctggataacaagaatgtaaggcatgatacaggatagttggttgtaaatcagaaaaatctgagtgtgatgtagatggaacaatggatttcaataggtgagattgtgcaagactgcctaagaaggtagagttgagcaaggcttaaacaattggtaggattttaccagtgggagaaggcggggagagagagccaagagaggcttctaagtagaaggaagagtgccatcagcattggagggttgaatatcttagtggaacttggcttcccttagaaagacaaacaaataaaagttattcaggaggaaatcagagtatagcattgctttaagaagtaatgtttaattccattagaaattgattctacttacataaagtgttggtttactctaatgtcttctcaaagatatctactttcttgggtatgtgtatgtgtgtgtataaatcagatactgctgaaacatctttcaatttcaagcagtatataaattcctctgctagtaagagagggttgcactcctggcttttgaactgattaaaggaagaaagttcttaaaaggggttaaactatctgaagcatagtcagaaatcagtggaaggattagcatatttaatcttggttattatcccttaaaatcatgctataacttaataacttttctttagaattgatccagtgaatgtttgacttcaagtgttaatgtctttgaagaataaagaagttatcaggtttttccttttatgtgccttccatttggaaacaagccactttttataatgtttcataatgtattatttaaaataaagttgctgtgaactagattgcttgtaggcacattgtatttctggctgccaataggaaatgtttttctcacaatttgagtgggttttttttttaacatgttaagaatgcctctttggtttgtgacctcatctgttcatttttggggatgctgagattgccggtcatatcaccttcaaggatctgagaaacagtggtcaatatcagggcttttatgtgaagagaagattaactgggtatagaaatgagagggaatatgacatattttaaaaacaagataagagtatagtatctagaattctattcctgtcattgtcattaagtcatcagaacattttcagaaaattaagacatctttcttttttggtttatccaaaaaagaacatttttaatgaaaagaggatgatatttaatgttattatgtttgaccaaggaatagaacttactttaaatacattctagtttaaaggactaatctttatttgctaaaacttcatgcatgtgtattttacttcaagttttagagtccgctaaaattatggacatgagatttttatacatgagcaatagtttatcccttgttatttctgttctgactaggaggccaactgtagttggtatatgatagtaacagatatttctggaatgaataaatgaaaaaaatcaagggcatagaaataagtgttgtcattgaaaacagttgaaagtttgtcggtctccctctactcattctaattttatactgtttggcctctgtcactcactagcttatgactttaagcaacaactgtgtgtaatatatataatttttagcttttccagtaaaatctctatcacagtatctgtctctcaggttagtgaggattaagtcaggtactgtttttattttatcaaaaatttaaggaaagtgtacagtgtaaatttggtatctatttcaaatttcgggtgcttttgaatatcttttcctccttttttttttctcttctagtgaattagacactacatttaaagggattgggtgcacacaaggtcactaggtataaaatttttcactttcaataacatgggatatggttatttaattaagtgttgtaatgtctctgagagcctcctctgtttctgtatttacagaattgtagaatcattaagtcatcaaaccccaagggggtctcaagcatttatctagctcattctgcagacaggactggagaaatgtttatcagctgtctcttctattatatgattataagaattaaaagtaaaggcaagagggggtgcaagagaaatggagatggttaatgggtacaaaaaaaatagaatgaataagacctagtatttcctagcacaatggggtgactatagtaaaatatagttgtacatattaaaataactcaaagagtataattggatcatttgtaacacaaagaataaatgctcgaggtgatggattccccatttaccccaatgtgattattatgcactgcatgcctctatcaaagtaactcgtataacccataaatatatatacctaccaaatacctacaaaaattaaaaattaaatacagggagccagacatggtggcacatacctgtagtcccagctacttgggaggccaaggcaggaggattgtttgagtctaggagttccaagctgcagtgagccatgattgctcctctgaatagctactgtactccaggctgggtggggaatagagagaaacttccatctcttattggggggcggggaggagaaggaagatactgaccctcagtgtaaattggtgaaaacttttctaaaagtaatgagaggaacgttacgtttgtaatttcctaaataaatacttactggtaaaatggatccctctttattttatagttaaccagactatgggagtgtcatgtgctttttccagatatctatattttagcaccccctcccattcatccattttaatttcttataaacttcatagttggagaaactccaaccaaaactcctgattttgacagcatttcatgtaattttactcctaacaatacacgtctgtttctttcatatgtagacatactaatacacgcacatacagtatttgaaaaaaagttatgtaggaaggctaattatatgtttcatctaaccataacactttcatgattacattcacagaaaaaactttaacaaaataaaagtgaatagcaaccatctccttgcttagtattttttttttactgttgaattatcctaactgatgtgcagtgaggttgctccaaatacttatctgtagaaaaataaatattcagtagacagaaaatttgccttctgaacacttgccttcatttttgcatcttccatggcatgtttgaccaggtcagtaatggggctcctagggcccaaagttcaggtttcctttcgtaggaagcagaagctctgctttgttatgtggtcacattgcatggctgactctggccagttgtcttgcacctgtcactggccatctatccctatgggacaacttttaccatccatcaccaccgctagaaaaacacttcaaagtgcatgccttcctgtggatgggctggctgcatcatctcggaatacaggaaagcatgttattactgatttagaaagttactacttctaaaaaggtggcacttggttccagcccctcagtgcccatcaatttcacccggttctttgcagcatatggagagactgggacagccagcatggctccccttgagctcagcatcaagtcttgttgccttttgcaatatcacttttttattttatcgccttcactgcctttccttctacaaaacagttgtatttgttttgtcttgttctcctctttaagatcctgccagaggggcacatagatgtctctggatatgggttgatttaatgaaatcagagtgggcacaatccatttgctatagagaaatggcagattatactttaaaatgaagagaaaccatgaagaatttaagagaaacagcatagtgattatactcaaagtgctaaagaagtatttaagtatcacttttcagatctcttagcagttaaggtttgtcagttgattttatttattttttaatctagctctaatttgtcatgcctcaaagtgaagtatatgtttctgataatgctaccatttggggcatttatttctgtgggcaaatgctatcatcataaagcacgttggggaaatacaaattaaacatattggaaggggcttatgtatgctaatatgaaatggtattgtaatttctccgaaattcatgttatgggtactttaagaaacaaactttctaaagagatcttcattttgtcaatttgtaacaagcattttgaagccataaaaaatcgctaatgcaatgccatgtacagaatcatgagttagatatttgccctggtaatccattctggattagttttgcatgaagcagaatgagggaaataattattttctctgctgacaggtagttgccaagtgtgaccagccccagccccacttcttcccaggaattctacaagtacctactctattttttacagaatgtagttaatggtgttttttacagaatgtagttaatggcagcaagtgggtagaagaggggagctagaatggagctcactgaagcaaactcaacaaaggccaagagggaaagctggtgaggacgctgagggaaaatgtctccagcctagtgtcaacaagttctgtctctacatggctgtgtcttttgggaaatcatgctggaccaaacagagcagaagatttatgaattgagattaaccgctttctggggtctccctgtgggtatctcataaatactcatttatgccttttatagtgttctatcttttctttgacttattctccccattgctggtttccataccaatctagtcttcagatatcttcctgctgcttcctttctccccacatttgaaattcagcgaaccattatatattgatgtaaagttccagacgcctattgtgcatgcaatagctagggccagggaaggattaaatacaagattgtatatatgaaagtaccatgttcattttattaataaaaatataccactgtcatttgttactgctagtgacaataatgtgtcattatgatgtaataacaatagcagagacagggtggggaagctattttcttcccacgattcgattttcttctttgaagaggtagtaattcggttgtacacacttaatattgaagcacatcccaacccaagaactaagtaactattgttattacgcatccccttcccacactaagggatttttaagctgaaaccgcaagtgtacaaaggctcagaggtgagagacacagcaagaatctcagctggggtttgtggggctatgggatttgagggagtgtggtggagaggaagaggtagaggtgactggcattgtgtggagagagaggggtccaccaccctcacaagggcatcaggagaagtgatgaagtgatgcatctgagagacatttaggaggaatcaatagggagatatggaactgatggatggtggcgcccaagggaggggaagaagtttaagatgatatatggggacgagttttgtgcacctgggtaggttgtagaggaaatacagcaggagggcggatgtgaaagacggttgctctggtgcctctctgggtgaaaggatagcaggtaacttgcagaaatcccccttgactttttttttttttttgaaagggagaatgtatttctttttgaagaagtttacattgaacctaggaaaaacacaggttttcaatgtttttttttttaaattggatttcttcctcaaagactgttctagttcccccttcactgtcactgaagtaatgctgagcataaatctttcttgaataatgacaaatttttgtgtagttctatatttaggaggtatattacacttgcctttgtgattttatggatattaggttgggattgtggttaagctaatgaactgaagaactcaatctgatggtctcatcattcaatccagcagcctgtcttaaatttcaggctaatatctatgtttatacatgattgcttagctagaattctttaggtgtgataacattgttcgtattcaacccaagctgaattttaataccatgactttttaaagttcatttaaatatacctttaaactttttaatcttttatgattttcacttaaattatggcattgttgatttaacattatgattgtatttatataatatgacatagaccgatagagcaattatcgtatgccaaaagtatatgtataatatttgggttgctatattggctcaagcaattgcattcgttgaaaccacctattaattttggggcagcttttgaaatgtagcaaagcacacaatctcatgacaaatccactttattatgtattttgtttcttttggacagtgcctcaaatgtagaggtactgaaacctttttgtgtttttcagatgacatgaacacttgtttaaatgggcaaacctagaagtgataaaatgcagttctgggtttatagagtgtaacacacctctttctgcctttatgagggatgtttcttacttattaaaatagtatacaggcttagcataccccatggaaaataagcaaacctttataaatcataggagtgaagtagtttttttgtaggttggtgttattgaagtcatgttgccagtgtaattatacatctagctattctcttatgaacaaaatcttaatatagtacaaggtcatgttattgttatgatagcctagtaaattaatttctgctatgattcttgcctgggtttttttgggggggtaattttagcttttgatattcaggatggagagtagtccctctggatttaagtatgtggggaaagagaaaataaagcagaatttttgatgatttgacaggtcttatttttgcttcgtatgcaaggattttgaatgatgagagaatagagacatgttgtttcattttgtgtgaatttatcaatttagactttgttgaattggtacttgtgtcttgaaatttataagtgaattctagagccaattattttttcccttctagaatatcttagtattcttttttaaaagtgctgagtactttttaaaaagtattcttttttaaaagtacttttaaaaaagtattctttttcaaggagtgaatttggggttgctttgaagtctcctgacatggggtaccttggtatgcttggtagagctatgacaggttctgctgaagccagggagcaagccatgactgcacaacattcttggagggaagggcccaaggaaaaggatttggggaaaggcatggaaacaaatatatctttcttcataattgttaatatccttgtatgtggatacacctgctttgttatttttttttgatttggaaaccaaagtaaatttgtctaacattatatattttcaacagattaggtgtttataactccatacttcctgaaatctttctagaaatttatacaaagatttggaatattaagattggcagaagttaggaaataaaaggtttgaatttatgagatgtacagttttctggggtttttttgtttgatttttagattttgatattacggataacttttgttatacattgaaatacttaaaaaatttctgtggctgtcttataaattggtgagctttgttgggagagttgacaagagtcttagtggggtcagtgcctggaatttccgggagtttgtgagcttggatgggaaaaagttatacttgtattttcactaatatctgattgaaatttatcatttcccttaattatgaatgtaggcaaaaaattaataagaaaaactgtgactttgctgctaatagaaattatagatattttcatatcacatggttgtagagatctcaaaatatttaagttcatcactactgtaaattacagtatttattaattacagctggatcttcttatttcccacactaataaagcagcatattactgtatcacattttaaaatattttgatacctgtcaatctgattgatttctcagtaatctagttatgatacttaagaaacataatttgataagggttacgtagactttatcaggctgccaaaagatccatggcactaaaaaaggttaagaaattctgggtaggggaaccaaggaaatgagtattctagagctggttttaccagtacaggttgagtatcccttatctgaaaatttgaaatctgaaatgctccaaaatgcaagactttttaagccctgatataatgtcacaagtggaaaatttcacagctgacctcatgtgagaggtcacagtcaaaatgcaggtccccaacacagtatattcagcatccccaagggaagaaaggctttcctagcccccttcaactgtgatgtatcttttctgcacatgccagatatgtgtctcatattttttattgtgaagtacttacatggaaataagtgttaagaaaaggattgcttattggtagcatatagatttagagtcaggaatgatggtgatttcaaacaaccacagattgtccacatgggtggctggccaggatagtgacacctttgctttctaatggcttagtgtacgttattttgtttcatgcacaaaattattaaaaatattgtgtaaaattagcttcaggctctgtgtataaggtgtatatgaaacataaatgaatttcatgtttagacttgggtcccatccccaatatatctcattatgtttgtgccagtattccaaaaaaaaaaaaaaaacccaaagccaaaacacttctggtcccgagcaatttggataagggatactcaaccagtcatctcactgtgtgaccttggacagtcaggccatatggcacattgtgccacatgatgactacacccatcaacataggaaagtattataaagataaaacaaaggaaatagctttgaaaaattttagtattatgcatgcagaagatgttattaaatggaattgttttttgcctttgtaaggacctaacacatattgttaaggattgttaagaggcatctaatatgaattctgcattcactctacaatttcagagagtagctcagtatcattactctttatagggaacttctacgggaacaagccaattccaatatagttccagaaacattaccattcatggaagcaaagaagattacttttctctaaatatttcttctaaaattgattcctgtaatctccaattctgtaatccaaactgacgacttcagtgctccctaaagcagtgtgtcagtcaggcaaagcatgggagaaaagcgcatgtttcatttccaacacactgaagcgtagtagtatggcgaagctcctcgagttatttaaaggtattaatcaagaaatataagaaatggcaggagggaagaacatactgagcactatgtatggtgttttacaaaaatgtagttttcattacaatcttatatagatcataaatactatggtgcttaacagataagtaaactaaaattggtaggcagtttactaaatggtcatcttacccagaagttatgaaacttagattcaaattcaagactaattgtaagggcatatgtttgaaataaaatgtaattactgagtaaaattaggtattaattttgaaatgtgagatcttctttagaattttctatctgtaacacaccattttccattgacacgagagactgaatacagtttgagcagaagagtatttttacccctttgaagtgataggtgagacttgatgtagagatatatgaaaagtcggctgggcgcggtggctcacgcctgtaatcccagcactttgggaggccaaggcgggtggatcacaaggtcaggagatcgagaccatcctggctaacacagttaaaccccatctctactaaaaatacaaaacattagccgggcgtggtggtgggcacctgtagtcccagctactcaggaggctgaggcaggagtatggcatgaacccaggaggcggagcttgcagtgagctgagatagcgccactgcaatccggcctgggccaaagagcgacactccgtctcaaaaaaaaaaaaaaagagatctatgagaagtctagactttaatggttacgagtagtgctgtaatttcatgtaaaaaatcctgtccccgatgcctgtgactttgatacataaatatattttgaagtctgtgaagtgaataaatgactgaaaaatggaaggaaggtgtgttctgacaggtccaaattctgactagaaagaaaacaggactttgacttgggatatttaaaatctctctgcttttcagacaacgccaacagccctgaagagatcactaaaagcagaaaagaatacaaaagcaatatgttgtaggaaaagtaaatttgtactcttgattagcccctcatggtcactcagggcttcggcatctgtcatttcacgtattgtccttactcacaggaactctgaggtgtggtggtttaaagcagtgtcctctccactttatggatggagcacaggaaggcaaggcaacgttgtcacctttatagatgacactcactgctaggtcttctgattcaaaatctaaccacttttcaaccgcatcccgttgtagttgtgtagtatgggagaaagagaaatggaataaatgaaaagtgtttgaacggcatgtagaaagatgtcataacggaaacgccatgagagccatagaggagggcctaagtcgctcttcctacaattccctgcttaagtcagcccttccctctctcctttacccacccctctgcagtcaggttttcctattatagattctctctcatatactccacagcagttattacaattgtaattatttacatggggaattttttggttgaatggctctgtcttctttgagtctagattgtaaattccatagcaatgggaactgtgcccattttcttcactgctgtatagtctcggcacacagtccctataactctgtaacttttgagcagatgaaagcgggagtgaatatgtacaattccgtaagtgaatggaaataatagaacagccaatgtgaaggtaaaggctcagacttcaaaaaatttcatttttaaaatttttaatttttaaattttaaagttttaaagtttttaaattgacaaataattgtacttattcatgaggtacatagtgacattgtaatacacatatagtgatcagatcaaggtaattaatacattcatcatcccaaacatttatcattttttgtgttgggagcattcagtatcctccttctatatgaaactgtataatacagtatcattaactgtagtcatcctaaaatggtacagaacactagaacttatttctcttacctaaaaggaaataatgcaaacagcctgaaatcttgggatacgccacatgtcttgaattttccaggaaatctgtatattaaattttaggggctgggtgtggtggctcacgcccataatcccagcactatgggtggcctgaggcctgtggatcacttgaggtaaggaatttgagaccagcctggccaacatggtgaacccccatgtctactaaaaatacaaaagttagctgggcatggtggtgtgcacctgtggtcccagctacctgggaggctgaggcgggagaattgcttgaacctgggaggcagaggttgcagtaagccaagatcgtgccactgcactccagccttggtgataggagtgaaactctgtctcaaaaacaaaaacaataataacaacaaaactttagggtagttatctggttatgtccctcaatttttggttcagaaaatatggttacctatacctcagtaaccattaaaagtaaggtacaccttgtaagaatggaaggagaagggaggaccctgaaggctgtgaaactctgtgatagtcccggatcaggtggtattaactccagtttaacagctggagagatggtggaccagagagatttaacttgtccaggattcagataataaggtgtcagagttgagattaaaaccagagcccacaatttcctattaatgacataatgttggaggagaatggaaaaggacaatctcagaggcccctaagggcagtaacttacagagctacttctgggcaaggttcaatctggcagtctcattctttggcttcttcaaagtcctgtctaatgatgatgttggcaataattactgagacattgacagaatgttaaattatattacatttaagaaagaaaagaatatcgtagcctagagatttttattcaaagtgattaaaggtttagcattttaattctgatgttgaggattcttatgtctaaattgattctgggtaactgatgtgggctgtcaatttagagattctctatttttatttaaaatttattctggatgtgtaatctttgcatttttaaaaatcctcaacttctgctggaaggttatctgaaaacaaacacttcactgtttttatttagcagagattcattatcaggcgctagaatacaccataattaatacatggtctttgtcttgctggagcttacaatctagtaggggaaaaaacacaaagataattacaattcagggtgtttatgttgcaaggggccttgggtggcatcctgaggaggcagtctatgagggtgacagctgtggccagtcatacactttattatcgtggaaccccagactttatgggtgtaacatgtaactcaccattactgtttcttgccaacccatacttaatattgtgttataagtgatgttagcattatataattaagatgaacacttacctgaaagcatctattaaaatacctggcatataggatttacagatttttaattaattctctcataaacccagttaattactctgtgaattggaaaaatttcagtcagaatcaaaatatttcaaactgattcaaattatgattctttttataatccaaacacatcctaaatccaatagggatgatattaatatgtcggatacttataactttttttaaaggttcttaagggaaaaatgggtttgttactgaagaatatatactaatatagtttttgtgatgcttttggctgagttgtttgttttgcctataagcactttagctttaccgtaagagcctttaatacacagagcatagagtaggaaagtaatgagcacactgaaggcagttacacagtgtatagatcttggactatgttgctatgatccacttttagttggagcttttttgttttgtttaaagaagaaagcagaaagcacatagtgtcatgtaggacaaagaacatgtgtacagcatgcttatgtatatataaattaataatgtcaattatattatttttccaaagttctctacagtgcttgatgctaaataagcaaaatgataagaaagtataaagtaggggcagatgagcaatgtatttatttgtattgccaagattttctaaatggcttaggatatcccttttatgtttttgtacttgagcagtcttgctatagaaaattccatttcttcttagccactcttactaagaaattcctttcactttgttctgctaccttgtcttcctgtttagaaggaaacaaagcaaaccccggggttgctcctccaccactatgcaccaattccttatttgcacctattcctgccttattttctcagcctgaatgctcacctggctccagcctctgtagttacatgggataagctgattgtgtgtaaagatttagctctcctgtacattacattgccattcttaaggtttataaattatcagcttggaggtttctgtgagcctcttgaaatgacacgtaacattctgtatacatactacatgggagagtctgggtacacagcttgcacgtgtttctcaaaggggtctgggacaccataaaatatggagaaagtgggaggtgactcttagatttccacctgtaccaccatagccccttttttaaaagaacaaaactctttaaactctgatacttggacagcagtgaaagatgtactgatgactagtttattttggcacatataaaatttattgatattcatttgtttatcccttagtttcgtagatatatctgccatttgtgaatggtaaaaccaaaggtcactagaatcctttgttgtggggaaggtatagatcgtacatctaacccaagtggatgtgtatcacctatatgatgataaaaatcctaacttctatcaggaacatgtaagaactatgtggtctgatacattctaaaaattacatctaggttacaaaatgttcaaattattagctttcttttttttcccccctttaaaaacccatggtgagggcaaggtagaggaaataaacacatttggtcaaatgttgggtgtagttctaaggaaaccaacttataatcttttcagatgatatttaagttgaatgggtcagaaaataaaaaaaagagagaggactatatagggaagttggaccaaaatcatagattagcagaagcatttcaatgatcagttcattcaagcatgaattttttctttttacagctctctcctggtaaatgatctgaatgaacgatgcttgaaaaatgattcttgcactctgtgtgtgtgtgtgtgtgcgtgtgtgtaaattgtggtttagcttattttatgtgatccacttagtgtttttgtagatgttttctttttctaagatcaaacttggctaatggaaatactcttcttggtatgttattactgtgttttaaggaaattacaaattacaaattaacttattagccaggtactctaatggattaattataagcatagctataagtgtgttgaaaatgcaagcctttttttcttgagattctaagactactacttttaaaacctcagtgattaaacagtttcatataatttaaatttagcaaaaaagaacggagatatggcattttatttttttttttattttttatttgttattatactttaagttctagggtacatgtgcacattgtgcaggttagttacatatgtatacatgtgccatgctggtgcgctgcatccactaactcgtcatctagcattaggtatatctcccaatgctacccctcccccctccccccaccccaccacagcccccagagtgtgatattccccttcctgtgtccatgtgatctcattgttcaattcccacctatgagtgagaatatgcggtgtttggttttttgttcttgcgatatttgactgacaatgatgatttccaatttcatccatgtccctacaaaggacatgaactcatcattttttatggctgcatagtattccatggtatatatgtgccacattttcttaatccagtcgatcattgttggacatttgggttggttccaagtcttcgctattgtgaataatgccgcaataaacatacgtgtgcatgtgtctttttagcagcataatttatagtcctttgggtatatacccagtaatgggatggctgggtcaaatggtatttctagttctagatccctgaggaatcgccacactgacttccacaatggtgagatatggcattttaataagggatttaccttgcgttaggaacacgtagttaagtaaatatagtcctttgaaagaggatattttcagtgcattttcacaatttaaagatatttgtattttttcctcttacaacagcataaatcaaaaggtaagaacttcctattcctgatgtttattcattttttttaaccctcctcatcaaacctttgccttgcttttaacatgccaggaactaaagtggctgacatctctgttgcactttcttttaaaatgtcaaaaggaaaagatataatggagattgataaacagaaaaatcaatataatatggtattatttagcagaaataattaatgttaaatgaagagcctttggtggaggctttgttgtatgtaacataaaagcttgtcatgttggtattttcctagattcttctaggaagaagtttaaaagttttcgatatcacagaaatgtattatatttggaggaatatgtgtagcattatatttgcataactgaagttatgacttgggggagacttccatgttatatttaccatattaaaagagatgtatagtctagtcatttcatagtgtactgaatttatattgagagatataccttatgtaaaggaatctgattctctgactacagaggatgataatgatgacgataacattaaaaagcataggtactcttttcagtagaataaatgagtttgtcttggattatactaacacttttactacagaaatgaatggattctaattttaaaggtttgtaaatgaagacttaacaatcatttttgtaagctcattataaaataaaagaacatgtattttttgattcaaaagtatttgctaaggattttcctccacatgtgccagatcagccttggaacacacaccccactattccttccattatctaccatgggattataggtttttagagtatttatgaatatataacattttgattcagaatgttcaacctatatgaaattgtcactgaaggtttatcaatccctcccccataatagcaggtgttcctatgaggactctgtagtactgtgtcttctagattgcaaacaaaaagcatcccgtaacacacacacacacacacacacacacacacacacacagtcgtgcttagtgtgtgcttttgttcattgaaaatataagcatatgtgagaaaggctcctttaccacagactgtttgaatgactatttcattttaatctctgatttcttgcatcagagagttgtgggaaagtgaatttttattttagtaacaagacttatttttatgtacacacacatacataggctactgagatagcatttttgtaaattagtccgcccttgggatatgtaccatatacattaggctactttaagaagctgtctttttgattgtgaaaaataatttcataggtttatatggttcctaagtgttcctttagcaaattccaacttacagtagttttatattaagctcccgatacgtttacatgtagaaaattgtggcttaatacagtatagcatagatgtgacacctttatgaatggcactacagaaaaacgtcacttttttctcccccagatgtctatttcacagatgtctgtcttcttcaaatgagaagttgctgattgtacattcatatagttttcttccaatttatataatgtgcatgtagaggcacacgcagaatgtgatggaactagcaacatcatttgtacattgacaacagattttagttttcatcagtattttaagttcatcaaattactttttagtaccttgaataacattttctcaaatatgcagtgatcatactttattacagcaatgtggctttctttgattaatataacatataaaatgttttttaaatttgtctcttttcattcccttgcataatgagagttttattctgtagatctgaagtttacatgtgaaaattatgtgatttttcacattcaagatcttgattgatagtggcactcagtaaacacttgccacttgttagatactagtctgagaacttcatgcacatgactgatttaatactcactaagctaatgtggtgggtgctagccctgttctcattttaaaaacaaggaaatgacaggcccagaaaggttaagtaatttggccagggtcaggtagcaggtccaggatgtgttctacaaaaccgaaactttgcttttcctctttagatttctgacaagaaacctatttatgcgaagtgttattgttaacattgtttttgagctttgttagtagataacttgccagtatcctcccagtgatcatagtggacctcctagctttagctcagtttcggtgacatttgttgtttgctaatgataaacaactgacgggatggccctgcccttcctgtaggggatgagagctgctgcagatgccagagcatccagtgagagaggggtgctggctttgttcccaggtgccccaggagtacagaggtggcactgcctgggaaattcaggaaggctttcttctggatgttataccaggattgaagttaagcagtcagctgtctgaaaagaatcagtgtgggagtggggtagagggttcagagtgggagtagggtagcggcttctgggcaaaagagagactgagcaaagatggagaggcagaaacattatgataaatgcaaggccgttaagtatatgttggtgcttatgtgtcagattttctttgaagcattctattccataaaataaacttaacggtgtgtgctgtagttttccttggggcctctaatctctggcactactcactttccccagaagatatatggatctcaccttgagaagcctgatgtataagtagatatcattctgatgtgggagaggttgaagaatctttactatagaacatttacacttagtttctcaataagaaagctcattttaaaccttggaatgttatataaacaagtggtaatttaattttgttcaattccattaaaactgttattgtcctccctttattgaaataatttagtgatattagttttgtgagctatatttattttttttaaatagcataaaattggcataaaatcatgaaatcacttattactttccattgctaatttggagtataatgtttttgttctaatttcatgtttctcctagctacaagacatccatttaattttatacctccaaaatgaaaatatccttgattaagataattctatatccttcatgattgaatgttgagcagttttatatttttaataaaaataatttcatgaaatttgtttcttttggagatactttatatacgaatgtcattgaaaaaatctgtattttaaatattaatcttccattattgttttgtatcaggatcttgttattttagaatatctatctagtacaggcctgaacaaaaacatgccttgacaactattcgttctgcagaacagtgtaattcattttgttaatacaattctttggaaaatatatacacatattttcaattatttatcttcattgggtgagtggctacctgcaggattggattgtgtaggtttaaatatagttgactcttgaataatgcaagggttagggacactgacaacccggcaccatagaaaatacgtatataactgttgacgcctccaaaacttaatgactaatatcctgctgttgaccagaagtctcactgataacacagtcaattagctcatattttatatgtttatatataatatactgtgttcttatagtaaggtaagctagagaagacgaaatgttattaagaaaatcataaggaagaggaaatatacttaactgttcattaagtggatcatcaaaaaaggtcttcatccttgtcatcttcatgtcaagcaggctgagaaggaagagagtgaagggaatagatggtcttgctgtctcaggggtggcagaggtgaattcccatgtataaggacccctgcagttccaacccattgttaaagggtcaactgtaattttgtacatgtctagcagtataatatcttaggacctgtgatttgtagaataatttttcaggctctgtaataccatttttaagggatggtgaaagaggtattcatccctaaattaaagagcctttaagtagaatccattaggtatgcaatggacatcactaggaatggtttcttatttatgtgggttggcctaaggtgaaactctgtcctgcaaaacaataaaatcttgataaaacatgtaagtcagtaagaagaatgatattagatcctctaatatgactcacatacagagagtctattgttctgagcagcagtgatggtcttttcatataggaatataattataaaaacaatatgcatttgtcttaaaaatatggttttctactctgtaaaagtaaaactcattcatcatagaaaacttacaattccaatttttgctttcactcctctatacctgtctatacatatttttaaaaggaaaaattgtatgcttttgtgtaagcctttagtaaccacttgcatttgcggtatctcatgaacattttccagtgttatatattctagaaaatgtatatatgtgtgtatatatggaagatgtatattgttgacaaaattatattgacgtatttaaacaatcttctattattaggtggtttcttatgatggttttgataaactaaatttaccatagactcttggatttccataatttaaaaattaaaatgaatttgtataatgaaaatatattggtgcttcaagtgtattattttatcagggtttttgaaattaatttaactgtagggttttaattataagccttcttacattttttagaataaagcaggctataaataaatactaaaatactatattatctggattaatcatgtcttgggagcattttgagattgagtctacttatttagacagaaaaataagatccttctaattttgtaaaaactgacgcattgccctaaagtaagtacttcactttttttgctatctgtaatctatacaaacagcttttgaagtttttaaaataagatctgccttgtcacttctggtgttctcattaatgtttattcattcattgtttgactttatattttatgttattttagaaaatgtgttatatagcttgttagctactttacatctttaaatcacattacataagaatctttatttttaggggtttgctttgtgagtttagtggttagattatttgcatctctctacttaaaaacaaaaacaaaaagaacctgatggttggcatttccaaaacatttattaaaatatgattttaaaactatgaaaaatctttagtttgctctctactgggtttcattgtagagggagttcgttgttgtttaaacttgaagatgattgattttaggaataagataaatagagatcagcgaccaaatgtacatgatgtctcatcttttcccaacaccctgctgttgccagtaggagaaaatacacagtgtcacattgagatggggtctttcaattccatcagagtggcagcctgcggtgagtttgcaacccctgggtgaagagaatctcaaagatgccaagcatcattttggctagatgaacaaggagatagatagatagatagatagatagatagatagatagatagatagatagatagatgataggagttgtatgtagagttaagatttattattttagttaacacagaaaagagaaggcaaatactgagtgacctcaaaaataaagcataaggtaatatcccataagctttactctacaaatcaccctttctcaagatgactttcaaaaacagagagaggaatccagaaaaatgtttacagatgtttcattgctggaaagtgggtagtacactgttctcccaggacttatgtcgcaaaatacatcctcattgtttaaggaagtctgcaagggaacagatctgatttctctatcagcccttctccctacagcaagttagaaaattaaaaacctatatttccattggttatttaagaataatattccagaattccctcatttttcaaccacacattaatctacctactttttcaatatcctgagtttaggatactgaggaaacacatggtgtttccacataaccagccaaggcttaagaacagaatggggggactgcattttaagaatgtcactcttgaggcagtaataccacctacaatatctagggtcaccttgtaggtaggcatttatcacccttttatgactgatgaaacctagactctgagtttatcactgtgagtcaatttatttgctcttttattcactcatttactcaaaaagcatttgctgattgatcacttgccaactgtcctgggaagatgctggagatgcaaattgaacaagatgctgccctcgccctgctctcaagtggctcacatctcttccaaggctgttactaagccatgaggcctggggtctgtagagggctctttccaggatcccactgctgacaaaggtcaatggtagggcatctgctgaaaggtgaagtaatagatggtcctgatcagaaagaagaaagaggcaaatgttacatattagaaaagacaaattaggctggatgcggtggctcacacctgtaatcccagcactttgggaggcctaggcaggtggattgcctgagctcagaagttcaagacccagctgggcaacatggtgaaaccctgtctctactaaaatacaaaaaattagggcatggcagcttgcgcctgtaatcccagctacttgggaggctgaggcaggagaattgcttgaacctgggagatggaggttgcagtgagctgagattgcaccactgctctctagcctgggtgagagagcaagactccatctcaaaaagaaaagaaaagaaaagacagattagcctagaatatgaaatcaatgttagaacaaaagattagattgcatatgcaacactatttaagtgttaaaaattgaaacacagacacttgaggctggttaagggttttttggtaatccattatattttattgaacacctatatgttcaaatgaacatgtattttattgaacaacattatattttattgaacacctaaagcatattttagcattcagggttgtatacaatgtagtttctttctctcaagatgggaaaaagaataatagaaggatattttatgcaagattgagggctattaatttatttcatctcaataaacatttattgaacaataaaacttgtttcttgcccttgagctcacagccatttaagacacctgtgacaggtgccagccactaagggctctgtctgtatcccttgccaacaagattagagtgtggtctgaatgtgatgggaacaactgaaggcttccaaaagcagaggaggagcacatttaaatttatgttttaggtttactatggtgactttgtaaaaatggatttgaggagatgggttaggagactattctagtagtctgaaaaaatatcatgacctgaaccagggtgtaatttggaaatgtagttaactgatttaaaacgtcttttagagatatttctaaaatgttgagatttttttctattaatgtattagtatcagttgcttgaaaaattaaaggatatctagtttgtcttttctatccaagtacttattaatcaaaagtcttacatgttatgaatagcattcccattagtttcagtcttaccacctgaaatgtcttggaaattcccatattcagcaacagaaagtcagtacacagatgacttcaaaagggccagcctgcaagggcactaacttgggagaaaacagacctccttctatactttgtaattaggtacattggcttgggcaattaatctttctcaacctcaatattctcatctataaaatggagatatgccggaattccctggcctgtagaattagtgaggataaatgaggcactgagcataaagcacctgggacaatactagctcactttctaagcaccatttgtttttatttataataaggtactttcagaaaagaaaactatattgtatttggtttactctgccacttgcataacaggacacttgttttgcatatttactgaattttatgtttatctttcttttctttttcccccaaatgttttcctgcagccttataacattaccttgggagcggtaaactgtagtgttatttgataccaacaatatagaccataaacctttcttttacacttttctggagactcaaagaaatttagcaagtaatgaaaaaattgtctaatgggaaatggaagtcatgaaattaactgtgatactgtttgtcatacattaacatcaacaacaaaacatcaaatgtgttataaacactaaggaaagtagttattatgaatttttttttccccaagccaccaccagaacctttgcagaaaggagagaattctcatttaagaaggtttgcttagtcgtcagtccaggaagtgtctttgtaggtatttgtcatctattttgtaggaacctttatggggctaccctgcagaaggttataagtccttctttctctgagtacaatttcttttcttttaggtttgttttctaactgaccttgacagcatttccaacaggcaaaattatgagttgtccctggagaagtgcttcatttcagacccaggttatagtacaagagacataatgaaactagaaaaaaaaaatagagagtcagccaaataaaaagatcattgacaaaaagggactcttgtgacacaggatgcttttaataccagaaatgtgaagactcattttgcgtcgtttgtactggaattttcaacaagaggtgacagagtatgtgaaaccattgttttatctgtgtcaggttctgggttaatggtaaggaaggatctgcttcaggcctgtgatgttgttgccactgctatgaaacaaatgggtaaattaattgagtaattcagcaaataatgaaaaaactgtctaatgatcgtttcattttctttcttgagttattttactcttctttctagagctattttccttgtgcttggtaatactaatttgcagcaaaaatagagtaacacttaaggtaaccttaacacttgaatatggttgaaaagtcggaagaagggaggagagtcattcaagcagttaaaataggtagaagaaaatgtctgcagtaaggcccttttgataaagccaataaacaagtaacaggtttcttggattattgtatattagaaggagcaaattaaaagctgagaccatacatactgaaagtggtagaataggatattaaaacccttacaagtagacataagcacttagcacagcaattagagagctatctgttatccaggcaaaggatcctataaacctcattagctccccaatgacacctctgtgtttacaaccaagtacaaaaattggagttcataatgatgaccctgggaaggtgtaattacatttatctcatgctatacaaaaaggcagagaagaataagatttctctttggatggtaaaaataagagtttgggcaggtacatgaataaatttcgtgaatttggaaagctgactttcatttattctactaatattttctgagcacgtcctatgctctagatagtttctaagtgctggagatataaaaaacagatacaatccttgccttcatagaatgtacagaatagtaggtgaattggacataaatcacatagtgtaaattaccaccatggtaagtgctgctctgggaggacagagcatattgtaacatcatgtttgtggctgatagggctggtgggggaatgtaacttaaatccccaaccaagtgatttagacttaccaaaacagagtgtgacttgagaccgggctgctctgagatgagcattgcatgctccagtctctcaaattctccagagggaaggagagagagacaccaaccgagagtgtccattcctcttctcttcagaaacacctggggtgggaagtaatgtaaaggagaagtgcatggtgctgggataatttataatcctgatcaaggtctttagaagctgtattctctttctttgccttgattttttcatctgtaaaataggcaaacaggggtggcctattgtaactcatgagtttgttgtgagcttcaaatgaagtaattggtgtgaagtgcttaaggatgtagtgattggaaattgtaagccatataaaccaccgctgctacagtggtgcagtggtggttggctggttattattattattactatgaaggaatggtatttatttttgtgtcatgaggttgtaagctcaaagagtgcaagaaatttggtttgttcactgctgtagccccatcggggcatgcgtaggtactcagtaaacatttgttgaataaacgctttgggaaagttagtagggaaacagtgtgcaaatgtttattcccactggtgcatttactgaggccagcgtatcttgagagaacactgattttattgggtatggaatgaagaattatggggaaattaatactagacatacataattttagaatttgaagaattgtagggattatctaatccaagattctatagtggtaagcgaacgtgacccaatagaaggggtgaaaggagatgtcggttgaagatagagtattcactttttctattctttaatttgttttcagacatggtatctatttgatatttcaaataatactggaggaacatttctgggtggttggcaagaagcatgggtgggttaaggaaaggtgaaaaacgctgatttaaaatacatgccagttggaaggtgatgcaacaaaaagttggaaatttatacaaaaatatacataaaatgcaggaaaattaaattacagtaatatagttatttttcacttattcctgtttcagaagccatttgttcttctacctgtgttctagcttaaatatcctttgcagtgcttttcttacgtggcttcacagcagaatttgacccttaggtctacttcctggttgctcagagccttcttgccttccactgtaccacattgtctggctttatcggcttattccatgttttcagctcttcctcgtcataccactccatgtgttgaaccccacaattctatcagagacaaactctcattagtgcttctttttactcttccaaacttcagttactatctgtatcagtgctgccccatagaaatagaatgtgagtcataatgcaacttgacatgtaattgtaagttttctagtagccacactacaaaagtgaaaaactgaagaaattaatttctataatttgtttagcctggtatatcaaaatattatttcaacatatcagtataaaaattgagatcttacattcccttttcatactgtcttggaaatgtagcatgtatcttatttatagtacatttcactttgccctagctgtatcccaggtgcaccatagacaacatgtggctagtggctaccacagtgggaacctgtatgcctgaggctcacaaataccaagtatttgtctttagtccataactttcactgggctctaaacccatgatccagtttcctaggaagcacttcagactcggcctgtctacagctaagcatatcctcttctcttccttcgcccagcctgctcatcctccagtgtttgcatcccatgaaagatgccttcatctacaaaggatctgttcgctgttccccatcattgccagttccatggaccatgtcaccaccgttttctatctgggctatgttgatagcctcctaactgctctttctgccttcattcttgccataacacaatgttgctcacaattcctgcattgttctaatagtctccccaagatattttcatagtttccattgccttagtataaagtgcaaacatgccttattgtatccatcaagggtcatttccctgcctgcctttctgggcttcaccctcccctctctccatttcagctatctttgctttccttcacttctcactctcactattgtctgcctggagcattctgccctctcctcttatgtagcaacattcattttgtccctcagatggttttggtagagaagtctttcactgcccttggcctagatcggtctcctcacatcctccatagctctcatcatttgtaaagccttgtgtttgtcttctttactgggctataacctctgagaagggagggactgggtccaacttttgctctaccatatgtgtagtgtgtagtaaggtacctggcctgtagtcagtatttcgtgaatatttagaaggatgagtgaatgaagacacccagaaagaacacagtattaaagtcctcaggtttaattaacctttactccggcacacgaataacctttggaacatcgcagcttctgcttgaatacctagtgacagaaagtttactaactagaagaacatttcttctttcgaacaagtcattattaaaaagctgtttcattatacatagaaattatgtcttatgtaagaaaatggtttgtaaactttaaaggattacccccctcaaaaataaatccataagatagaggttgtattattctaagtattctgttttaacttgtcattgttgagtttggttaatagatgcatcatgaattttattttccattgaaaaacgatgtattttttttactcttgccaattattgtctacaatagagaaatacaacattgccacctcatttttcattttctgtcttatttacatgggtctgtgtttatatatgttcatgtgcacgtgtgtatatgtattgtctctctctgaaattaaaaaaaaactaactaaaatatccagtgttttccattaggtctcatttgttacacatttctacttttaaattacttctgaaccacagaatctggcaggcctttttggaaggcatttgaggataactactctatctggaatccagccatttacagtatttggaagcaaagaacaaagcaaagcaaattgagattttgttgaatgtttaaaagttttggaaagaacagttaaaaagaaatccttcatggatgcatgctttgaaaacaccaagttttctcaacctttaattttgtgcatctgaaaaccaacttgaatttgtctttaatcccctgctagtcagtggaaagtaaacaagcagaattgctaattctatatggccttggaataatgtttaaaggaacaggatagtttaatggattaattactcttctttacagtattagattcaaatccagcagagatgcaactcttgataatgtgtgtcattcccgttttttctcaagataattcatacgtaattgtctgatttttagaatgtctaaaacctcttgataatgttaagcatgttgaacaatagtagtaatgttgacctcacactaataatagagaagcagtggaggtaaacagatgtggactcaagtcctggctggctgtgggctgtattccagctcctgctaatagcagctaacattcattgagtgctgaccaggtgccaaacaatgcactgggtgatttaggtatgttatctcattcaactttgaggaccatattggtatctccattttataaattacagaggttgagtaacttgccaagtttatgtagctcccagtggagtttgaactccattcctgatgtttagcttcaacgctcatgcttttttcagccatcctgtctctatgttgtttagatttattatctttgtcgttacttataattccagtatttcactatgttagatatacttctaatcatgttttagttgacctgaatataaggaatacatttgagtattttcagaaagtttaaaaaactctagctattaatatttctgaaaatataaacctgcaaatggccatttatgttattttagagagaaagtgggtagaagtttctcttccttgttgtagttaagtcagtcctaaaaagacgaataaggactttggaaccattctttacattttgaataaaacatatgtctatcccccttcctctagatatagcttatgcggtagttgccatttagcaattaatttaaagctatgtcaggaattgtcaccaacattagtcctgcttattatcctcgagagtcaacaaacagtaatacaactggcctcagaatttttttcagttgaaccacaggccactctgcaacctgtctttctatgaagcagttgtaatttaaccccaagattctgaatgtccagacctcaaaaggagaatagtacttattacaccttctttctcctttgcaatttttttcgagtgtgtgtttgtgcgtgtgagtttgtcactgagtggcttttgctacctaatctgaccttttaaactttctcatatacctttaaaatgattcttagggggagtttagtttgccatttaaaggaaattttagttctagtttcagcaaacataggtttgaattgtctgcaaatcacaatgagaaatccaggcttcataacctccaaccccacttcaaacattgatttaaaagaatgaacctaataatattaatgaatcccagggaccaaaagcatgccagtcagaatgggcatcctggggaacaggttaaccagtattctaacctctctgcccttgaagtttaagtacatttaaaaaaaagggggggtcgggggggcggatatcccgctgctgccttgggacttgaatccgtgagatgtaatgagcctgtgtttgggccaaaataaagggttaaaccctcttacttagcagttctttcaatggcacagaaagtgaacttgagataaaataacaaggaccagcagaatgaaggacagctaagttacacctgatcatgaggccatcagtttttgcctgagtcctatagagttggcataatgagtatctatctttgctttgtagttttcagagtttgggctgcttagtaatctttcctgagtttgattagggaaaagatgccatgatatttgatttaataattattgtggagtcagatgaatttcattctgtatccagctaccatattaatctccaaaatgggttatatttttctttccgggattgggctaaaaatctgtccttgtctttaataaactaaagaaagattactttatatctgaagtagttgcattagtaatggagtcattccaggcactttgaagtttctcataccctgtaagagatgtcaattaaccttatagctaaagcaatttctagtaaaaatacagacaaaacgactgaagtagtatttctgtgaaaatcttactgttactgttataaaaatggtgagatttagaaataagataaaaaattttcacagttctttaatgctactgcacaataattgtatgtgttaataataaaggcatagcaggggattagaagttttagtcactgctaatagcagtttaaaaaaatccccacagcaggttcagatatgtgggaacggattatagtgaaagctcagcttagctcataaggggcttattatggatcagcaaaccagagcttcatcagatatgaaatacaggtgtatactcagaattgtttcactttgtgccacttgatacctatcacaatacatgtatggagcactctacaaaaacaacagctcttgaaccaattcttatcaggtgtttataatggctcagggccttgcgcattacaaatttcctataaatgtttgttgaattaaacagagatctgtctgaaatgtaatgctgaccgtcacgcacctttgtcctgagaacatagggccgtgattctgtgtgtgtgtgtgtgttatgttatttatggtactagtttgaactattgtgccgtgtagaaaagccacgtacttcgctatccactgagctctggcgatgtgacccttcatcaaaggtctcaggctctgacgtttgactcctcgtagccatcttcttttgtatcattaactctgttgttatcagtgggactgtcttcagcaacccctccctcatccccccggctggttgctaaacatgtaaaaccagagtaagacaagtcagaagagggcagcagaagagactatgtaaatccagtgtgtgaagttgtgaccgtaatattttctgctcaggagctgttttgcttgtcagttgtttttgactaagttgcaaataggcagggtttgggtatacctcaattataagtgcatgagttatttcctagttttcaagtacttgttctttaaaaataagtgaatatattaaaatagtggtgtttgtatgtatataatgcaaggtgtttatttctgggtagccattgctgcttatgtttgtttgtttttattttttttattgatgcataagagctgtacctatgttgggggtacatgtggtgttttgatatatgcatacaatgtgtaatgatcaaaccagggcaattggggcatttattaccccaaacattcacctctttttatattgggaacattctaattctcctccagcaattttgagctatacaacaaattatatttattatagttgccctactgtgctttcaaacactaggtcttattccttttatctaactgtatatttgtactcattaaccaacctctcttcgtcgttccctctccctacccttctcagcctagataaccaccaatcaactatctccatgagatccacttttatttaagttcccacatatgagtgagaacacatgatatttatctttctgttcctggcttatttcacttaatataatgccctccagttccatccatattgctacaaatcacaggatttcattcttttcatgggcgaataatattccactgttagtatcactttttaaaaatccattcatctgttggacacttagattgattacgtatcacggctattgaatagtttgggctattgtgaatagtgctgcaataaatatgggagtgcagatatctctgatacactgatttcctttacattgctggattatatggtatttctatctttagttttttgaggagtctccatatgttttccatagtgactgtattaatttatcttcctaccaacagtgtacaagtgttcccgtttctcttcatccttaccagcaactgttatttttttttgtctttttgataaaagccattttaactgggatgagatgatatttcactgtggttttatgtgcatttctctgatgcacatacatgatgttgagtatttttcatacaccttttggttggccatgtctcctgaggaatgtctgttcaaatgttttgtccatttgaaacaattggattatttggttttttaaatttatttgtttgagttccttatatattctgattattaatcccttgtttcatggatactttgcaaaaaaccctttatgtgggttatctctttgttgtttcttttgcagtgcagaagctttttagcttgataggatcccatttgtgtatttttacttttgttgcctgttcatttgaggtcttacccaacaaatctttgtctaggccagtgtccagaagcatttccctaatagtttcttctagttgttttatagtttcaggtcttagatttaagttgttagttcaatttaagttgattttttgcatatggtaagagacaggggtctagctttattcatctgcatgtacttactcagtttttctagcactgtttattaaggagactgtcttttttccgatgtatgttccaggcacctttgtccaaaagtgagttagctctattctttttcattggtccatgtgtctgtttttataccagtactatgctgttggggttactatggctttgtagtatattttgaagtcaggtagtgtgatccctccccttctgttctttttgctcagaattactttgactattcggagtcttttgtggttccatacagattttaggattgccttttttcaattctgtgaagaatgtcattggtattttgatagggacattttaatgataccagtaatttccatccacgagcatgggctgtcttccctttttatgtcctcttcaatttctttcgtcagtgttttgtagtttttcttatagagatcttttacttctttggttaaatttattccttggaatttaattttttttgagccactgtaaatgagattgctttcttaatttcttttttaaattgttcactgttggcttatataagtgctactgatttttttgtatgttgactttgtattctgcaactttactgaattcatttactggttctaacaatgttttgatctaatttttaggttcttaaatataccatgttgtctttgaacaagaataatttgacttcttccttccaaattggatgtcatttatttatttttcttgtctaattgctctggctaggacttacagtgaaaggacttttttttcctctctcttttatatttcaaagcttttatagacgttgtatctgagtttaaatcacaagtctatatcaattagttcattatgcattttaagttgtaattatgcagctcatctctaatatgccaaattctcttaaacattactaatgttttataattaccaaatatgaacatagcacttgaccaaaagcatcaataagattgttttaattcttttagacatttctgtacttaattctaaatttttctagggttaatgtttagctactaaaggaattatgtcatctccatcattttagagttgcctactcatcctgctggaggttgtggttgtatatcatctaaagatttaagtcaagccattcattgaattctgacagagcatactgagccttacttaagaacttaaaacagtggtcctttcatcctcttaccctgggaagctaaagtccatggtgcttggaatagctctgtgtctcccttccaggctgatcgtctgccaggtttaacttttcttttaggacagagattgtcttacccatctacctccaaaggctgtaaaacttggtggaatcctgcattctctaaatcaacttccatacttaattcttacagatactaaaataataggaattggaactgaatattttctcatggctttttcttttcagtcacaagtgaaaggacttttttaaaattaaatttttttttcttcaaatactgcaaaagggatgttattgaaaatattttaggtgtttggaaacacttattttgtagtttacaaactggcaccagtgctagatttggccctgagatgtgttttgtttggcccctatgcttttattgttaattaaattaattcctaacttttagaaccaagttatttctgttattgggaggatggaaggatcagactattcctttcagcattattggatttgaattcctgcttgtccagagaagataccctcttggggctcatgtctccagttcactgcattcaccccattccctattgctcctttgtgccgtgaccaagggtttgttgccattcagcaatgggcttaccctgttccatcctgacaactttcttcctgtattttagctgcataacccctataatcatttgatttttgacctgatttttacatgaataaaccaatcctagataaatcattggaaaacttttacaccactggcaaaatgaagtgcatagtaagatttcatcatctctactatttaaaaataaaaccattatgtacttttccttttttggaaataacatttttaaaaatcccataacatttagctctttaaatattttaccattgattatctgtctgtaactacatagtccaataaaggggaaaaagttgataactttagtgattttcttctaagatagttattaacactgtagaaataacaggaatttctgaagggaaaatgagttttgtgagttacattatagtttttctgttccttgtaatgaagggatgctttcctttttgagaacaaatcctattcctaaataataacaataatagaagagtcatatattgtgctaactctctatgacctgtacatatagcattaatccacatagtacattaatgagacccgttttatttaatcccaatgctacaaatagggaaaaacttaggtatgtaaagtttaggaaaccttacactggatcacaaaactagtgagaaattcaagatacaaagtgcaggttttctgtttttatgagcacttaaccaacatctataccatttttccaaaattaaaagtagaaacaccctttattctacgtcctttcccaaaaaaacaaaaacagaaagtgaagtcccattttgtatactgaaatcatcgcattataaatgtgctaatgaggatatggattttctttgcctgaaatgttagcttattttagaaatgtaccatatatttctactcatccatagaaacatttttaagattaatattcctttcagttgttaaaagatagccaaacctgcatatttaccccatcttgaaaccaaagcttattagaccaaattaaatcattttaacaaaatagataaatgtttaaacttagcaccaaatcttgattgttaaatatatttgaaactcaatgcattaataaaaagaacttttcttctttatgtttcaactttgtagcatccctgcttaaaatttgataaaccaatcctaaactgtaacttctatgtcagaagtggtattatgaatgtcaggaataataaaataatcagaatgccatgtgaaccaacagtcaacttgacttaggtttgaaagggaagaatattctaatcacatgttcattttgaatagtttcttatttttaaaagtaagatatccttattgtagaaaaaagaaacaatgtcacctcttcccatgccactgaaaaagaggaaacagcaggtattggcatttgatatatttcctcatagacttttttcctgtgtgctttaaaacaacaacaatgtgtgttatcatatttccatatatttttgtattctgccttttttctccataatattacagtatgaaaacttcgtggctgggtgtggtggctcacgcctgtagtcccagcactttgggaggccacagtgggaggatcacttgagcctaggagttcaagaccagcctgggcaacatgggaagaccccatctctacaacaaatgtaaaaaaaattagtcaggcacaatggcatatgcctgtagtcccagctactcctgaggctcaggcaggaggattgcttgagcctgggagttggaggctacagtgagccgtgatcatgccactacactcagcctgggcaacagagtgtgaccctgtctcaaagaaaaagaaaaaaacaaatcaaaacttggcctaattatgtttttatatcattttaatgattaggtaatacatatgattcttaatccacaaactaggctatgtaagatacctgtacttgctttcatccaaaatctagaaaactctgttctgtcaggttagggagagggatgttcaatttctcagctgtagcttacttctcctggggccttgcaaagattccatggtgtgtgtatatgagggtcttaacatagcactgtgtaggcccccaattatgctctcgccactaaagtccccattgtccaagccgccatttatcccatttatccaagttcccatttatccaagttcggctaaatcataccaatttagctgaacacattgggcactttgaagtccttgagatcctttggagtttgatggctccatgtctttggagccctcctgggcatgggaatcctgtcagatctgtgacctctggagctcggggctctgcctgcataatcctagcatgtagccctttttcctagagtgccgccactgccttaggtcttccctattcttaacacagatagctttagtgctgccattatcctgcagctctcaaaggcatgcttcccttgccacccgtaggaacacttgttctgatcccttctaggagcacaggctgccagaagatgtcgggaaatcaggttgtctgtgagggacggctctctctgactctctgagacactatcactcaaggcaagagagggaaatagcatgcttggcctttggggagaaaaggaattagaggaaggtcacaaaacaaaaatcaataacttcatacgttattcaatctcagttgcatagtatactgtggttttgcatgatatacttgggtatactatggttttctaaccattccattttctctgacaactgtttttttcattgttttctgtgttgtaaataacactacagtgaaaatttttgtgtataaacatttttctctatgattttcttaaagtctcagaagtagcgttataggttacaaagtttttttttttaattactttttagacacatagcaaaaatgttctctaaccctgaaattgaaaactgactagaacattcgagggggtacagctgtgtagtgaggagggcagcctgtcaaatcattttctttttcaaatttttaaaaataatgaatattcaagcaattctaatattactttaaataaattttaccaatttagccgaacacattgggcactctgaagtacttgagatgatgctctcattggatgattcaatggctgctgttgtgtccagactgaacagtagttcttctgcaggcgatcactcctgtagttttacctgcttgggatgtggcctccatctgcgcatgtctagaaattttctcattacgagaaattcctatttagttaaacatttgtttagtatttatttcagttctttcgcaatcatctactttgtaagtttacatgtctcatagatgttgataaataaatacagaagtcaatgatcaaaattaaatggtacattgttaacatccaccagctttaatccagctataatgggaaagaattagaatcacttggtctgttaccagttgttatgggctgaattatcttctcccaccctgactcctgccccaattcatagattgaaatcctaacacctaatatatcaaatgtgaccttgtttggaaataaagtcatcgcagatataattagttacaatgaggtcatactggaatagagtggcccctaatgtaatataactggaatctttatacaaaggggaaattgggacacagatacccacggagcgagaatgtcatgtaaagatgaaggcagagattagagtgatgcagcagaagcccagaaggctaaagattgccacagaacaccagaagcgaggagagaagcagggggcagattctcccccataactctcagaaggaacccaaccctgctaacatctcgaactcggacttctagcctctaaagtagagagaataaattctcctgtagtttaagccaccttgtttgtggttctttaaggcagccctagcaaactaatacactagttcaagaatgttttaagataatctgtttgatagctacagacactttttttaaccttttacattggttgttccttttctttgccatctagaacatattatggccacatcaatgccagaatttgttgtgtgtacttcctcatttgtgtaagtttttttgtttgtttgtttgtttttgagatggagtctcattctgtcactcaggctggagtgcagtggcgcgatctccgctcactgcaacctccacttcccagttcaagcatttatcctgcctcagccttgtgagtagctgggattacaggcaagtgccaccacacctggctaatttttgtaattttagaagagatggggttttgccatgttggccaggctgatctcgaactcccgacgtcaggtgatccacccacctaggcctcccaaagcgttgggattataggcgtgagccaccgcgcctggtccatttgtgtaagttctatagccttgaaagatgctttaagcaaatttttttgtgtgcttttgtactttctctaaatcaaagcctgtctcattttatccataaatgttcctagtattcttcataatttttctgaagacttctgtaatctttatgctcaagtcagttacggtacttcatgacatctggttgttgggaagtccaccttattgtctgtcatattctccaaagttatttcaacttcacaattcgttttctaattatcaaaccatattctcagttgaaaataaattttaaatttatttttaaatagattttgtataattgaaagtagaaataacatggtttttgtccagtctttccaagctagttttaagaaaaagctagttttgcaggctttctaggactagccttgaaatggctaattccagcttttttattcccagggactagaactggtccagcgggcagggtcctagacacagtctgttcttgtgacaaaaacttgtctggctcactttgaaacaactcttgcactaatactgccttgcttttcttgattttatatcagctaggggtaggttcagttatagatacaaaaaaaatgtgtctctcatgtagaagaacctaggaggtgactgtgtgggactagcatgtgggacttggcataatctttggagactcgtggtccttccaacttttcattctccaatcactagggagattttaaggagactttctggaagttccaggagatagctgtgcttatatcttattggctagaacttagtcacatggttatatctagctacaaaggaaactggtaaatgtagtcttttaggtagtcagcaatgtgcccagcttaaaatcagaggtttgtttgtttgtttgtttttcctaggaatgggagactaattattagagatcagttgatgatacaaaaatgagaacttttctagtttttcataacatagaaaggttttcttttcttggtttttattttttctgtggcccagactggagtgcagtgtcattgtgtgatcttggctcactgcaacttccatctcccgggttcaagcagttttcccaccttagcctcgtgagtagctgggaccacaggcacatatcaccatgcctggctaattttttttttctttttttagtagaaagggggtttttccttgttgcccaggctggtctcgaacttctgtgttccagcaatctgcccaccttggcctcccaaagtcctgggattacaggcttgaaccactgtgcccagccagaaagttattttttatccagagtgtgtgtcttgttattttttaatgaaaaatacacaaagttaaaacacatggaaaagtagggattttatgtatagccttatgtcgaaacacatacacatacacactctaacacaccctccaaaagaactctttggaagaaaatcaaaaccttgtctaaaaccaaataaaattgatattccataaagatgtactacttgtatcccatgactacctctaacactccattgcaccatgtgctctttgtaacaccagtatcttggtgtgggaggcaaggctctaaggttacatggaaatattacccttgtcttgctatgcatgtgagatgttttgactaagatgctttgcagatgttagcataccaaggacagtctggtagccattttggtacggagcatcttgacacaaataaaaaagcaaaagcaaacaaacctctcagagataactattgctaagaaatgtttgtgcatgttctcccaaacttgataaatgggagggacgtatattcatagagatattgtctaagtattagggaaaaaagacattcccagtcgattgtacatcaaaggttatatcataatggtttaaattttaaaacaaaaaatgtcctcctaaaagattgaatccatttacgttaccagaggtagtgatcattataagtactataatctcaggcaaaaaagtgatgtagttattatttgcagttatttgttgccatgattatatgcttgcatagatttattgaacatatttctttttctgagttttatttagatataattcacatactatacgattcactcagtatagaattcaatgatttttagtgtgttgattatcacaatacttctttttaatagttttataaagatattttgtattaatactattttcaagtttgtaagtatctttagtatttctgctttcagaaaattctttccaattcagagtttatggaatgattctcctaaatttccttttaatactcttataaaccatcaaacttttagaattttttaaagcaaataatgtataaagcagatactcttactgcacctcttcaaccttgtgagatggagctgtgaagaagaatgaatgagcaccaaggtgagagttgagtttttcttattattcagtaataagagatggtacttggtatgtgacaagttcacttgtcctctgtaagattttatgcttcatcttatcacaccctttgttcatctggatgtgaaacatcagaatatatagatactatctctcttcaccttgtcaccacttctctttagtaggaagcttctttctgtttccaaaatgaaagtctatgcatatatatttatggaaatggcagtttttcataggatttgtagaatttttacataagtgtagaagaaaaagttcaatttaaactgtactttgtggatatatactttatgtaactttcatcctgggaatacctctgatatgtaagttttctaattgatgtgtctttacttttttgaatcaggagaattaccttggccattaaatgtaatatttacacttgaaaggcattgttgcctctttatactgcaccattatgttgatggatgtagccctgtgaggggatttttcctaaactcttgctctgcaaattcttttcatgcttgggaaatcttttttcatattcattttagtttttcgtttatcccacctgctgcttttttcttataagaagaaaatgtcaaagatttctaggtataacttttactactagcaaaatgacatattttttttccttttgcacttgtcaagtaaccttatggatgacaaagtttgggattagatctattgacccattttggacaatatatgtatttcctttatatactgaattagtccatttgcattattataaaggaatacttgagactgggtaattttataaaggaaggaggtttaattggtttatggctctggaggctgcacaggaagcataatgccagtatctgcttctggtgagggccttaagaagcttaaaatcaaggcggaaggtgaaggtggagtaggtgagtcacatggcaagagctggagcaagacagagggggaaggacccagacttttaaacaaccagatctcatgtggactatctcatcgccaagggaatggtgccaagccatttatgaggggatccgcccccatgatccagacaacctcccaccaggccccaactccagcactggggattacatttcaacacaagatttggaggggacagataatccaaagcatatcatatacaacgtgtgtaaacctttgaatataaagtcaaatgggagaataacagtgttagagtatttcacattagtgcgaaacataggcctacaggttaaaagtgtgtgacatattctttagtctttatttattaaaatcagtgaaagaaaaatatttacaggatataaaaagactacattttaatgtctaaattgggttgcccctgcttgtcacaggaagagggttgttttctaggatgctacaatattggcaaggagagagcctgctgggacctctgtgaatcactgggctataaatcgataaaatagagctggttatttcatcaggactttggatggaccagttgtgcttctaaggctgtaattcatagtgtgtgtgggccagaggcgtcgtcaattgtgaaacctcaacttgtgtggtttgtagatgcctattgagaatgaattccaacctgacgtgtattgtggggctttcattaggattaattagttactatttgctgagtcttatgaagacaaaaacagtgtcgaggtgttaaaaggcctgttatttttttctacttgcattaacaccaagatattttctagatgagagattaaaccttagaaacccccagttgaattttcaactcattcattttttaagtacttatctccaaaatagcattgcagaaatgttgacattgttgtagtgcagcctccctggctggtcagaaatagataccaggggatcattggccagacatggaactgctcaagtgattagagcgaacaacccattcaacacctacttgtgacttaggtttcaagttaaactaacatgtttagttataacttctccagttaacgattaaagttcatggaaaaatcactccgtatttttaactgagcgaattgttgcctttagaattgttcggaattcaagtccagcctccatcatcttgggcaaattgcttaaacgttctcaactttagtttccttacctataaaatgtagaaagtcctaataacttaaagtttttgcaggagttgcatgaagctgttgtatgtgaatgtctacatggtggatgtttagcaaatggcagttgtcctttttcctttttttattacttaaaagcattaccatttaacaaataactcttgtaatgaaaaatatgtactgtggaaaaaagggcagtgaagttttagaaggaaacaaaaagtgtagaatctgtaaataatgtaaatgaaagaaatcctaattgttctttgaatgacttagaaaatgaagatgttccattttagatgatttgtataaaattaggagttaggggcttaagtgcattgtgtatatatatgtgcatatatgtgtatatatatgcatgtgtatatacatatatattcactttagtgcattctgagattgaatcagtggcagagaaagaacagaaaaagaaagatgcataaaagataaatacacaacactcatggttcttacattggaaaattctgtagaccttgtgcccttgggggttgagggatatcaccatgctactccattcaccagggcccctatgtgccctggagtctcacactcaggctggtttcatcatgtatgtgaccagcttccagacccctgaaggcttttgcaattttgacctatgattgaccttcctcgcaccatcttattttctagtttttaaaataattttagaggttttagatgtctacaatggtaatgaatgaaaggggagaaaataatgtagttttatcatcaagaaatctagcagaagtatatttggagactcagtgaacctgcacattgaagtctggctttgaaatcaccaagaattcatctggactcagaaagccctgggttagaatttatccttcaccatgtactggctgcgaggctttgaataaattctttaagccagcacagccccaggctcattggtggtacttaacctgttattaatttcttccctttgttaattgagagttgaatacagttctgtattaatgatgacctctttactaattagaccaaaggataccaatgtaagaatctagattggctgggtagataactcctgaatacagaggagaggacaagaagtttggttgctgttattcaggagaggtcttttgaggggggcatggtgaggtctcctctgattccttttatgccaacctgagttggttaccatttctgtttctttggcaggggaagaccaaggaagatgctaggatctacttgaaagtcagggctttggctttgtatcttttctcccttttgaacataattgtgtccaccttgtaagaatgagaatttgtgaagttttcatgtggggagcagatctgtcttgtgtcacatgaatgcctttctttcccctacgcataccttcttcccatgctgattcctcctcctctacctccttcccctctcctctgcattgggaaatagaatctgcagccatttcatgccactgtactatgtgggtttatgctgctacaggcaaagagggcagtagaaggatccattcctcccacggctgctgccacctctttcctcatcactgcagtcattggtttagcaaatggagccttggctacaaatggcagagtcctggcagcaagccggtgttgaagttaaacccagagctcctggggccctctgttgcctctggaaatggacaagctggggcatagtattaaggcaacaaaagacaactgcaaagactaaaatccccccatgaaaaggaagaggctttaagggctaagaataggaaagcaccttgccattaatatgcaggtgcacatgatgctgtctggttaagctgtatagccctgcatgtaggtcagagggtgtatgtgagagggcagatataacagaacctgagagattaaagccaagcaggttaagtctgtgctgagagatgagaccaaacaatttcatctcagcttggtagtagtattaatatgtcaaccactagcaagaacaacaatttgcatttgcttgctgtgacagcatgcacccactcttgttcaagccctttgttcaagcatatgcactactgttccatcactcttatcacttcctttagtaaaatcattaggaggtcattgcagagggactttgggagctccagtgcctggatgttatcaactgattactgactatggggaagaacaggcattccatacctttagaggtgctccagaacacacagttgccacagtaattgtccccaggatccgattagggtttctttttgtttttgtttttagattgagactgtataaggttgaactcgcatttcaggattcacttatcctcaaccaaggtagttacatatccttaattttaaactgtacttttaaaacctcccctccagtttttgatgtttcagaaattgaaatatttctttctgtcaataagaacataatataggtttctttttttccagacaaatcagtgctgcattgtaccactaatcatgacttagaattgaggaaataagatatttttatttatattcctgttgagctataccaattattgaagattaataccctaacccctctcacatctttttccaatttaattttaatttctccccattatgtaacgtgtacttacgtagatctgaaactctagaactgaataatcaaaaataattcttattcaaccgtggacttttcttggatggtatatccataaagaagaattttaagtattattttagatcttttaaaattatgtttttaaagtatattttagtggtatttgtattactgagctctttgaattttccttttctattaatttacacagcagattaattttttgggaaaaaataaaaatatttagctgtgagaattagacaatggaatacctaagccctgtggcacaagcttccttcatgaaaggaagacattgttagtagtggtgaagcttcaccatcacaaaggttaactctgtcgtccttgtctctaatgtatcatttaaatttatatgttatgtaaacagttggtgtcaaaatcctgcaagccctaaagaaaaaaaaaacttgaagagttggacttttaaagattgacaacttgcctactattaaaacaataaaataatgggcaataataaaacactagtctggaccacctctagctatgtgtcaccttttccttttctctgaagaaagctctcaccttggaacactaacatgggcaactttaaactttacaaatagcttatacagatgcttcaaaaatatttattttttattttttattttatttatttatttatttatttgagatggagtctcgctctgtcgtccaggctggagtgcagtggcatgatctcagttcactgcaggctccgcctcctgggttcatgacattatcctgcctcagcctcctgagtagctgggactacaggcacctgccaccatgcccggctaatttttttttttttttttgtatttttagtagagatagagtttcaccatgttagccaggatggtctcgatctcctcaccttgtgatcctcccgcctcagcctcccaaagtgcttggattacaggcgtgagccactgcacccggcccaaaaagtattttaaaatgaaacatctgtagtttttaccccaacctgcgtccattgatcttgctggttgaatttcatgttaaaattgaataataagttagcaattaagtatatttttggggatcaaattattttgtctccaaacatcttaacaatcttgtgattcagtgaacaaaattaaaaacttacagaatctgataaatgcatccaaactagcacacgtctgtgtgtatctcctacttaatggaaaaaataaaacaagatattggataacatctactgtaaggattcacccccagatatactgaaggataatcaatcatttgattacataggtaaggggaggtatgtggttttgttgatacagtcattggggaaaaacttaccatttgctaccggctgtgtacccaacagtaaaagtagaagtctgggttttctctccctggtgaataaattatgtatgtttaaatctgttttgatcttaccctttttatgcagtaacgcacttggtagatgataatcacatgtatgaaatacctctactgtcaggagagaatactaagatttcaagcagtgttactgcacattaatgtaatgtcataacttcatgctagccttacatccatttctttctcactgacctacaacttacctagatgttgaggcaaacaacagggacaaagtactagagattaaaaaaagagagaagttaaaacacacatacacagaggctgctctgcaactttagttactttgcttatttttctcccacgttttgtaattttggtgaattgtaatatgtagtatgtaaggacatcattttgcagatgaggatacaaggccaaagatgtcttgctcaaagttatgaagctatttgatagcagaactgagagaactttgagtgatgaaaatgtgtgattatttttgtactctccccacaccacacacacacactctgtctctctctctctctcattctctctccctctctctctctctgtctctccactatgctccttgcttagttatagcaacagatctcatgatgcttgtattagagaattttcatgataaatttatggttatacgaataatccagtcatttgtagatatgcctctaatatgatattggttttctctctcatgcccatgtaatttgtaaagcaatgtttgacttttgtcacagatattttgctatgtctttaatttactggtttgtggcagtgaacaacaaaaagatttctacgatacttgttaaggcaggcaggatgattcttccccccattcccagcttttctgagatataatggataaaaattgtacatatttaagatatgaaatatgttttgatatgacatgagtaccacaataaggctaattattatatccatcacctcatgtggtaatcagtttggggtttttttggtggtgaaaacacttaagatttactctcagcaaatttcaagtatataatacagtattattaactgtagtccccatgctgtatattaggttcctggaacttatttatcttataactgaaagtttgtactctttgatcaacaactccccattttcctctccctgcagtcttgccaaccactcttctactctctgcctctctgagtttgcagcattattcacagtagccaagatatggaaacaacctaagtgttggtcagtggatgaatggatgaagaaaatgtgcaatacagacacatacacacaggaacacacacacaaacacacacacacacacacacacacacacacacacagaggaatattattcagtcttaaaaaagaaaaaagtcctgccatttgcgacaacatggatgaatctggaggatgttacataaaatgaaataagccagacacagaaagacaaataccgtgcgaccttatttatatatggaatctaaagacgtagtatggctctttatccagttaaggatgtatagtctttctcaggttgatgctgttttctctggttaatcatggagcatataggaagataatgtgatggtggtagatgatggtctcaccagctgcttgtcatttgcaccaggatttagatttgttcttggtggaaacacctagagggcagaggtgagaaatttgtgaaatggagacagatacaaacattttagattatataaggcttagaaaagcttgggattgaagactctttaaaaatgagatagaggggaggagccaagatggccaaatgggaacagctccggtccacagctcccagcgtgagcgacgcagaagacggtgatttctgcatttccatctgaggtaccgggttcatcgcactagggagtgccagacagtgggcacaggtcagtgggtgcgcgcaccgtgtgcgagccgaagcagggcgaggcattgcctcacttgggaagcacaaggggtcagggagttccctttccgagtcaaagaaaggggtgactgacggcttctggaaaatcgggtcactcccacccgaatactgcgcttttccgacgggctgaaaaaacggcgcaccacgagattatgtcccgcacctggctcggagggtcctacactcacggagtctcgctgattgctagcacagcagtctgagatcaaactgcaaggctgcagccaggctgggggaggggcgcccgccattgcacaggcttgattaggtaaacaaagcagccaggaagctcgaactgggtggagcccaccacagctcaaggaggcctgcctgcttctgtaggctccacctctgggggcagggcacagacaaacaaaaagacagcagtaacctctgcagacttaaatgtccctgtctgacagctttgaagagagcagtggttctcccagcacgcagctggagatctgagaacgggcagactgccacctcaagtgggtccctgacccctgacccccgagcagcctaactgggaggcaccccccagcagaggcacactgacacctcacagggcagggtattccaacagacctgcagctgagggtcctgtctgttagaaggaaaactaacaaacagaaaggacatccacaccaaaaacccatctgtacatcaccatcatcaaagaccaaaagtagataaaaccacaaagttggggaaaaaacagaacagaaaaactggaaactctaaacagcagagcgcctctcctcctccaaaggaacgcagttcctcaccagcaacggaacaaagctggatggagaatgactttgacgagctcagagaagaaggcttcagacgatcaaattactctgagctacgggaggacattcaaaccaaaggcaaagaagttgaaaactttgaaaaaaatttagaggaatgtataactagaataaccaatacagagaagtgcttaaaggagctgatggagctgaaaaccaaggctcgagaactacgtgaagaatgcagaagcctcaggagctgatgcgatcaactggaagaaagggtatcagcaatggaagatgaaatgaatgaaatgaagcgagaagggaagtttagagaaaaaagaataaaaagaaatgagcaaagcctccaagaaatatgggactatgtgaaaagaccaaatctacgtctgattggtgtacctgaaagtgatggggagaatggaaccaagttggaaagcactctgcaggatattatccaggagaacttccccaatctagcaaggcaggccaacgttcagattcaggaaatacagagaacgccacaaagatactcctcgagaagagcaactccaagacacatgattgtcagattcaccaaagttgaaatgaaggaaaaaatgttaagggcagccagagagaaaggtcaggttaccctcaaagggaagcccatcagactaacagcggatctctcagcagaaaccctacaagccagaagagagtgggggccaatattcaacattcttaaagaaaagaattttcaacccagaatttcatatccagccaaactaagcttcataagtgaaggagaaataaaatactttacagacaagcaaatgctgagagattttgtcaccaccaggcctgccttaaaagagctcctgaaggaagcactaaacatggaaaggaacaaccagtaccagccgctgcaaaatcatgccaaaatgtaaagaccatcaagactaggaagaaactgcatcaaataatgagcaaaataaccagctaacatcataatgacaggatcaaattcacacataacaatattaactttaaatgtaaatggactaaatgctccaattaaaagacacagactggcaaattgcataaagagtcaagacccaacagtgtgctgtattcaggaaacccatctcatgtgcagagacacacataggctcaaaataaaaggatggaggaagatctaccaagaaaatggaaaacaaaaaaaggcaggggttgcaatcctagtctctgataaaacagactttaaaccaacaaagatcaaaagagacaaagaaggccattacataatggtaaaaggatcaattcaacaagaagagctaactatcctaaatatatatgcacccaatacaggagcaccaagattcatgaagcaagtcctgagtgacctacaaagagacttagactcccacacattaataatgggagattttaacaccccactgtcaacattagacggatcaaagagacagaaagtcaacaaggatacccaggaattgaactcagctctgcaccaagcggacctaatagacatctacagaactctccaccccaaagcaacagaatatacatttttttcagcaccacaccacacctattccaaaattgaccacatagttggaagtaaagctctcctcagcaaatgtaaaagaacagaaattataacaaactgtctctcagaccacagtgcaatcaaactagaactcaggattaagaatctcactcaaaaccgctcaactacatggaaactgaacaacctgctcctgaatgactactgggtacataacgaaatgaaggcagaaatgaagatgttctttgaaaccaatgagaacaaagacacaacataccagaatctctgggacgcattcaaagcagtgtgtagagggagatttatagcactaaatgcccacaagagaaagcaggaaagatccaaaattgacaccctaacatcacaattaaaagaactagaaaagcaagagcaaacacattcaaaagctagcagaaggcaagaaataactaaaatcagagcagaactgaaggaaatagagacacaaaaaacctttcaaaaaattaatgaatccaggagctggttttttgaaaggatcaacaagattgatagaccgctagcaagactaataaagaaaaaaagagagaagaatcaaatagacgcaataaaaaaatgataaaggggatatcaccaccaatctcacagaaatacaaactaccatcagagaatactacaaacacctctatgcaaataaactagaaaatctagaagaaatggataacttcttcgacacatacactctcccaagactaaactaggaagaagttgaatctctgaatagaccaataacaggatctgaaattgtggcaataatcaatagcttaccaaccaaaaagagtccaggaccagatggattcacagccgaattctaccagaggtacaaggaggaactggtaccattccttctgaaactattccaatcaatagaaaaagagggaatcctccctaactcattttatgaggccagcatcattctgattccaaagccaggcagagacacaaccaaaaaagagaattttagaccaatatccttgatgaacattgatgcaaaaatactcaataaaatactggcaaaacgaatccagcagcacatcaaaaacttatccaccatgatcaagtgggcttcatccctgggatgcaaggctggttcaatatacgcaaatcaataaatgtaatccagcatatgaacagagccaaagacaaaaaccacatgattatctcaatagatgcagaaaaagcctttgacaaaattcaacaaccattcatgctaaaaactctcaataaattaggtaatgatgggacgtatttcaaaataataggagctatctatgaaaacccacagccaatatcatactgaatgggcaaaaactggaagcattccctttgaaaactggcacaagacagggatgccctctctcaccactcctattcaacatagtgttggaagttctggccagggcaattaggcaggagaaggaaataaagggtattcaattaggaaaagaggaagtcaaattgtccctgtttgcagacgacatgattgtatatctagaaaaacccattgtctcaacccaaaatctccttaagctgataagcaacttcagcaaagtctcaggatacaaaatcaatgtacaaaaatcacaagcattcttatacaccaacaacagacaaacagagatccaaatcatgagtgaactcccattcacaattgcttcaaagagaataaaatacctaggaatccaacttacaagggacgtgaaggacctcttcaaggagaactacaaaccactgctcaaggaaataaaagaggatacaaacaaatggaagaacattccatgctcatgggtaggaagaatcaatatcgtgaaaatggccatactgcccaaggtaatttatagattcaatgccatccccatcaagctaccaatgcctttcttcacagaattggaaaaaactacttgaaagttcatatggaaccagaaaagagcccacatcgccaagtcaatcctaagccaaaagaacaaagctggaggaatcacactacctgacttcgaactatactacaaggctacagtaaccaaaacagcatggtactagtaccaaaacagagatataggtcaatggaacagaacagagccctcagaaataatgccacatatctacaactatctgatctttgacaaacctgagaaaaacgagcaatggggaaaggactccctatttaataaatggtgctgggaaaactggctagccatatgtagaaagctgaaactggatcccttccttacaccttatacaaaaatcaattcaagattgattaaagacttaaacgttagacctaaaaccataaaaaccctagaagaaaacctaggcattaccattcaggacataggcatgggcaaggacttcatgtctaaaacaccaaaagcaatggcaacaaaagccaaaattgacaaatgggatctaattaaactaaagagcttctgcacagcaaaagaaactaccatcagagtgatcaggcaacctacaaaatgggagaaaattttcacaacctactcatctgacaaaggactaatatccagaatctacaatgaactcaaacaaatttacaagaaaaaaacaaacaaccccatcaaaaagtgggcgaaggacatgaacagacacttttcataagaagacatttatacagccaaaaaacacatgaaaaaatgctcatcatcactggccgttagagaaatgcaaatcaaaaccacaatgagatatcatctcacaccagttagaatggccatcattaaaaagtcaggaaacaacaggtgctggagaggatgtggagaaataggaacacttttacactgttggtgggactgtaaactagttcaaccattgtggaagtcagtgtggcgattcctcagggatctagaactggaaataccatttgacccagccatcccattactgggtatatacccaaaggactataaatcatgctgctataaagacacatggacacatatgtttattgcggcattattcacaatagcaaagacttggaacgaacccaaatgtccaacaatgatagactggattaagaaaatgtggcacatatacaccatggaatactatgcagccataaaaaatgatgagttcatgtcctttgtagggacatggatgaaattggaaatcatcattctgagtaaactatggcaagaacaaaaaaccaaacaccgcatattctcactcataggtgggaattgaacagtaagatcacatggacacaggaaggggaatatcacactctggggactgttgtggggtggggggaggggggagggatagcattgggagatatacctaatgctagatgacgagttagtgggtgcagcgcaccagcatggcacatgtatacatatgtaactaacctgcagaatgtgcacatgtaccctaaaacttaaagtataataaaaaaaaagaaaaagaaaacagcttaactagaacacatattcaaaatttaaggttatttatataatcactaaaaaaaaaaatgagatagacttaatttcattctttttaaaaaaaagctttttctgcagatctattaggttttcatttttgaccataatatttttctttcatttctacatatatttaaaataatgcctacatgatttaggatgtattttcaaggaaaattaaaactgaacatcatcttctttgagatcttttggcttattccagcatttatcatacaaattctcatactccctctctgtatcttctttataaccataaccagttgtatttttttaatgtagcttctgacctttttataagttgttcaaaataggtacaaagcaactgggttttgttatatttagttgggatattgcggatatgaagaaaacaaaatggcattgtcttaatttttatagctaaaaaattttaaggtagtcttttttcttttttcttttttttctttttttctttttttttttgagacagagttttgctcttgttgcccaggctcaagtgcaatggtgcgatctcagctcaccacaacctccacctcccgggttaaagtgattctcctgccacagcctcacaagtagctgggattacaggcatgtgccatgtcttttttctactctaacttttatgagaatctttctaatgcatgggttgaacttctagtgtcttaagtgaatacatttataagttttaatgaaactgtgattttccattaaaaatactgatggtggcctgggcacagtggctcaagcctgtaatcccagcactttgggtggctgaagcaggtggatcgcttgagcccaggagtttgagaccagcctgggcaacatagcgaaaccccgtctctacaaaaattagctggaaatggtggtgtgcgcctgtcatcccagctactcaggaggcctaggcaggaggatcagttgagcctaggaggtctaggctgcagtgagccatgatcacaccactacatcccatcctgggcaacagagcgagagcctgtctcagaaaacaaacaaaaaacaacaacaacaacaaaaaagaaaaaacaactaatggagggcatttaatttttaagtggaatgttcaaaaccaaaatgtatgctctctaaaataatgagaagtataaatatatagtataaaattggagtcagatctataaatagaataaaaacctatataactgagcataattttggctaattataaaaatttcctccttaaaagaaattgcaaagagagcatttcagatatacctattcttatttctcaaaatgttcacagataacttattgattcttatttctcaaaattctgtaacagttggtgtttgtacgtaattaatgccttatagaaagttgtattcagcaaatcaaagctacctttacctgggttgtggcttctcggaaagtaaataatctaaatttctccttaaataatacacagggaataaatataatacatgttccgcataaatatataaatatactttattatacataactatacagtgcatataaaatgaaagcataaacaaaccaaaattattcagttataccacagatgaccactatattatatgtatttccttacaatcctgtgtgtgtatgtgtgtgtactaacacattgcatataagtgagaccatgtttcatattacaattattttctgctattttgcttagcatatcgtaagcattttcgatatgaaaaaaattgtattaattgaaaatcttaaatcctatgtcatgttttacaacatgtttttctacttttaaccattctagttggcattattggttttccctcatataacttctataatgtgcaaatatgcatattatagaagtctggtctgaattctgaatctttaaggtgaattccaaaaacggagattgtaagaaagatttttggaagtatatatcacaaaactgttttcattactgcaatacaatttacattactgtcagcattgtagaaattgtattttaccatattctcatgaattttaggaatttgtgataacattttgcaacttgaaggtttattgtagtgattgattcatataaggcccctaaaggaaatttccaaaattctttggctaaagagtttattctaatttttcaaacagaatacgtaagtctttagggtatgtaatgccagctaagccaaacagcgttttattctgttgttcataaatacttctgtttctttagaatgtttgtcagaagaagtgttttggataattaagtctaaaaaaactaatttgcagagttacatgaatgcaaaacattctcataggctacatcaagaaaaatattcagagggtgtaaaatcttgcatcctgagagcatcgttgtgaagaaacattggttttggttagacagagagtgaggggttcagagtttctcagagaggtttatttttatcttcttcaagtttcatttaggagttaggaatactgagacaacttaacatagtaccttggagttgatgccacagatcattttgcatgacaggtgtgtacaggcacagtgacagcttccaaccaccaagagtggctgtggtttgccatggaatgaatgtctacataactaagagctgagtatgctcaaccatgggaagaccctactggactttgtgagtaactggcggatcaaagtggctgaacagtgagccgtcagtgtaggaggagatggagtgctggcccaaactattctggtcccatgacatactgcaaaagctgtttttaaaaaatgaactattataacatctttgatactgtcaaaacactggttatttgagacttctatttgcctgaattataaataagagtgtttgactttaaaaatacatgtcatttattgtataatgttcgtagaacatgttttcggtggtaggattttgcatcatgttcatgatataaaactataaacatatttatcatgttaaagttcattgtgtaattattggatgtgtgttttcttagttatgaggatattatgattattttgatatcagaaatagatgtagaatttgcagctgtgataaatgaggtgtaatggaagtctttcaatttcaattttccttttaaaatcttctggattattgggaagtcagatatttacatttcacttcagaaccaatgtagacattagatacttcaagtgaagttatcctttctaggaaattacaaaactgtttgcaagtgattattaataacatcaggatcatatttaaaatatggacacgcatgcagttttattcaagtactgtattaaaggcttcacttactcaattttcattactgtatatattgtaaaatataaatgtaagatataattttacttaaaataggccatttaatggtaaaaacacctgtaaaactatgcatagcaaatgcacagcacctttccgatgactgataataaagctctcaaatgcaaagagttctaatattttaagcatagttatatatctaaaaaaataataatgtttttcacagaaccagaaaatggccaagtttaatactgtactaaaaatagcataacttgcatcagcaactgtggatttctggtgaggtaaggaaaggtgggtgctttctctccctcttgtcatacttgctcatctctttcatttctacctcaaagtatgcgatcatatagcttttgaagatctttccccccaatatagtccttttgtggtttcttttaactgagtccaatcttacttgccctccatagagtttgtgattccttagtcacatgtggaattgtagtgccatgtactgttctaatgataaaatacacctcctctttcgaatcgaagttagagtatttacagcttctataaatgagacccttccatcacttaccttcccccttgaaaagatgtaatgcataggttatattaaccattataataaaactcacaagtttatgctagcaagaaaagcttgctgtgggatttagggatcttagttttataatactgttgaacttagcaagagaattgcctgggggtgtgttcaccatctttgcaagacagaagacatacagcaggaagaaagccaggctgtagtaagtaaggttaaagcaaacttctaagcaaataaagtttataaaatgatatctgaaaaacctttgagaattcagcagttaatggagtggtagagaattcagagtcaaaagctgggacccattttcccaccttactaattgtgttcttgagtatatcactgaagttcagttttctttaatttttaaagcacgaccgataatatctacctcataggattgtcctcagatttaaaaagattttagcattttgcaaaacttacaataatattttattagtagtttttagcttacaaaacattaaaggagatttttcaattgataaaaggtctcttatggaacataccaaagcatattatagtcctctactatgtaaattttctcacaaatattacacattggatggttcaaaaatatttttatgcataaaacttgtactgagtgcaatggactcatttacaatttgaagtttttcgggactcagtatgtttaaagtggttgtgttttttgtgtgtgttttaatagattggaataagtctgcataatcctcacaggaggaacgctgttggactgtagcccaaggactttctaaatactcagatgtttcctttctctggtaaattatccatcatgttctatctcatttaggtatggcttattctctgcagttggtaataagaaagtcctgggtcatttaaacaagtaattaaaaggactgttttactatttcttgcctttgaagagtgttaattttatttgttgtgagttaatgatgcatttattgtctatgcttacagcttctagtagttcaaaggtgaatcattctcaaagtaaaaagcgtttttctttggtaatatttaattgggctactgctctttaactaaagacatatgcttttcccataaaaaaaagcctttttataaatgaaatgcaaaactaaacataactctgaagcaagaatgtatcaacttagaaagtctgattatttgcttggaaaaatgccaatatagctaagttgaattattttatgagacatttatttgaattaatgtgacattatttaacagggagagtatcatatacaactgtatataacttgtcaaatgagatatagttttgtactttcttctcagtatacttttgcaggtggctttcacggaaattcattctttcattcctttagtattttagtacctactatgtgccagatactgtactagaagctaggatatatccatagcagagtcagacagacaatcagtgctatttcgataatggtaaatgcttaacaactggctggctgcagggaaagaaaggccctgatttttagcatttgctgattttgatagtgtaaatattcccaccacaactgattttaagctaccaatgtggttgaactgaatgcaaagatatatatatagcatttctaccatactcataaatgtaaataacctaaaaaacataaatttaaatgtagtaaaataattgggaaatgatgagttttgagtatttgttacctttgtcttttatataattgtcactttacagactacacttgctaataatagctgtagtttaatgactagctcgcagaattcctgaaaagttaagaattggcttccacgagccagtataagctgcctccagtacaccactacacaataaacaaagtaaaatgtgatatgttaaatggtgataaatattgccaccaaatacagcataaatcagaagcatcactgtgtgtgcatgcatgcccatgcatgagtactgctttagagagtactgcgggatcagtagaggcctcactgagaagtttgagcaaccttgtgaagattgtaaaggagatagttgtacaacttctgggggaagaacattccaggcagagtgaatagcagatgcaaatgtcctaagcaggagtatcttggcacattccagaatcatcaaggaggccagcatggctggtgcagactaaacaagagtgcagtgtaattggcagtgaggtgattaatagggccttttcatgtaggcctctgtaggccactattaggacttaagttgtcactggggcagttggaaacttttgagcaaatgaatggcatctgactcatatgtctcaagattactctggctgctatgtgattctaggggacaggggccaaggtatggaatcctgttaggacactattggcagtaattcacttggtgattgctggagcattgtggtagtgattgaggtggtgagaagtgaccaattctggatgtattttgatggtagttgattggatctgctgatgtgaagtgtgagagagaaaaagatggctccggggcttgtgtttgagcagctgcaagaatgcagttgtcattaacccagatggggaagattgctgcaggtttggaggtgagaagtatgttttctcagctatgttgaggtgcctattagacatttacgtggatatgatgagtagacagttggatttcagaatttggggagaagtttggtttggagttattaatttgagagtcataagaatagagctgaatgaggttacccagagaatggagaaacgaaaatatccaagagaaattcaacccactgggaagataaggaggagttggcaaaagagattgaaaagtacagcccaggtgttagaagggaaacaaaagcacatagtgtctggaaagcaaacaaagaacatatttcaagaagagtgagatgaaatgtgtctgatgctgcaggttataaggtcagataaggcgagaactgagagtcatccattggatttagactgtgaaggtctctggtgaccgtgctaagcagttttgctgtggctgaccatgtgcagggagtgggatcatgagagtgtgggaggagagaaactggagacagggagcacagagaattctgtccgtggttttgatgcaaagaacagaaattgctggtagctggcaggggaaatgggatcaaagtgttcttttaaaaaaattattttaaagatgtcatggcatgctcatatgctgatagaaattaacccgaataattaaaaggagcaaatttaaggggagcatcattgatgagcaggcatgagaatgtggggagctgatttaccaggcgaagagtcgacattagttagaagcatctttggatcatctgtagaaacccaagggaacagaatacacaggcccagcaggtacaggtgagcaattatgctggctggtagagacttatgaaagatcttataatcgcctttgttttctcagttaaaggagatgatatacatagttctgtaggtccatgtgacagcaaatagactagggaaatgtactgtgatgcctgggagatttctaggcagtactaaaggttcacttgcatttgttgatcttaaaatgagacccataatcttggttgagttttatctagccattttcagctgtatagatgcaggtgtggagtacatggagccttgggtataagcacaggtgggattttgctgggaaagtatgatgaaatgagcaccaggtagctggaggaattgaggatatatgcaagtggagcgattaaaatacactggaatgaagtaatctaaattctagcataagtctatgtaagtagtttaggaggaagtatcttaaaagttttctgttaattttcattgtaaaaataattctagttattatgatgaaataattatatcgtattcattcacagaccttagtaagtaggatagttttttttaagccctgtgatttttttctcattatttcctccacccccgcccttggagagccttcatttttttgtttgctcatttattatttattcaccatcgtttattaagtgcttatgatgtatcagatattatcatctaattgttcacttaacacattctatgaaatttatagttactatgatgagataaataaggagtcaaataatttaagtttacgtactacatggctacttatagtcatgggaacttggacaatccccataatctttcaaggtctgtaaaatgagagagataatatgaagatttctgaagtctaattctgttcataaaaacactgcatcttttaaccatgtgcatgtgtgtctcttcttactagattgtgggttttttaagggcaaaattgtgttttgttgataactatagaaagagagaatatgaagattctgaagtctaattctattcataaaaacactgcatcttttatccatgtgcatgtgtgtctcttcttactagattgtgggttttttaggggcaaaattgtgttttgttcatgactgtatatagagaatatgaagatttctgaagtctaattctattcataaaaacactgcatcttttatccatgtgcatgtgtgtctcttcttactagatggtgggttatttaagggcaaaattgtgttttgttcataattatagagtacatagtcaatgtttattaaataactttagttttaaatatagttttaacaggttgaaatcacatttgttttctatttcatgtattgtttttccagcacacagtagttctaaatggtggtgtccatctcttattctttcttctttttctttaaaaaattttttaaattgacacataataatcatacctgttcagagggtacacagtgatgttttgatacgtataatgtatagtgatcaaatcaggtaattatatccatcatctcaaacttttttttttgtattgaaaacattcaatatcctcctttcagctatttgaaactatataatatatacatattttttaagacagagtctcactctgttgcccaggctggagtgcagtggcatgatcacagctcactgcaacctccacctttcaggctcaagtgatcctcccacctcagcctcccaagtagctgggaccacaggcatgtgccaccatgcctaattttttgtatttttggtagagatggggttttaccgtgttgctcaggctggtctcgaactcctgagctcgagcaagccgcccatcttggcctcccaaagtgctgggattacaggccactaagcctggcctggaaacatgttgttgttaactatagccatcccacagtgctatagaacactagaatttactccttccttttagctgtgatttcttatcctttaacaaatctctccccaattgcccccttccccatacccttcccagcctctagtatcctctgttctactttttgcttctatgagagatcaactttttttttggcttccacatatgagtaatgcagtgtttaactttctgttcccttgtcataagttggtactcatcatgtagtttttttagagtaaatacatcaactttatatgctggtggatttcaagtagaaacagactaagatctttgggattcatatatgcaacaaattttcctaccatattgctagaattcaaaatgtttgaaggtttattctttagaaattttcctccataatacgtaatggcacagatcttaatacggacgctgctgttgtgtttgtatgggtttatatttgtcgctttctagaaaaaaaaggactggctgctcacctccacagatccgtagatgttaccctcaagcctgagagacacccagacttggaacttcacatgtccttgggttctggtaaagaacccaaacaatgtgaagtttcttaaatgtttggtagtaaagataaaaagagaggcattgtatctcacaaacctcataagcaaaacttagaaatccacagttagagttgccttctccaccatctctgctcagtcctgttgctttgtgttttcctctgatcctgcacctgggggtctcatcttctctagttcctctctgtctcagtattaactttttttcttttagagtatcttcaagtgccctttttttgttttgttttgttttttttaatgatgcagagcttagctttatactggctctttttgccatatgtaagcttatctaaaacattttccttcattcagtaggacccaccatccttaaaagacctacttgttttcatcctttgtgactttacccttccctttggggaagaagcttgttctgtttcccgactacccccaaggtagtgctggcaccatctctagatgattatgtattgttaaacaaatataaatatgaaattgtgaatgaagatcacatgggcatgtttggctttgtgtataaaggcattcacaaaatacaagttctcatgatttagatataaaagatatttaagtagttgctctgtgtcatgcatacatctcacattctctgagcctcttcttttgtcagatggagcctacaaatctcgtttgatcttcatatgagtctatgagttaatactttgaacataacttatgattctgttgaaaatcctaaaatataatagaataactgatttccttagctcaccatttcattttcaccttctagtacacaacacattttaactgctatagtaagttagatctgaaatcgtcaaaaatgactgatcccagagagaattcaacagagaaaattatcttaagtggaaaaattctttgaatgatagttgtcatttctctttgccaagttttttttttgcatttttaacctaataatgtaatataatagctaactctcttagtgtttgattataacatggtttcttatcagtgaggctgaaatagaaaaaaaaaagtaaatttaaaaacactaaagtgtcacaaaaatattcacgttcgagagaaagcctttcctcttatactatgctaagatattaagatgtaaattaaggaaatagttttaagtgttatttataaagctgtcacatttaatccattaattctattaaaagagacacatagttgtaaacaatattatcttttaactatgagtttatccactataaaattccttttatcatttcatttgccccataagatatatgtgctataatctatttttaatgttttacagcatatttatagggtgaaattatgcatttaactctatgaatgtgtttggaaaccatctgttagaacttacaggaaaatagaagcttccttcattaatatgttttttcctattttggggacttaaacatttagtattatccttcctagtccatactgagagattaaaaacattattgaagaatgagttctattgtgttcccacagggggattcaaactttactgctttgtagtctggcatactccagaattgttgtgttataaaaataaacatttctgatttactaagggaggaaataaatttgtccagttggtggtagtttagtattttaaacttcgggatatgttggaagaatatactggatagacttaccctccgacataggagtgataaattgattcacctgaaaattcactcaattggagaaggtgaaagaggggtagatttaaaaatgaacacaacagtgtctctgatttcaaggaagctaatagagctgtaaaatatgcataataatttgtagctgagtgatatgatgagtttcaaaaaaggggtacatctaagaccctgttttacctcttgcttccttaggcagttagttgatttatttccatttcttttttgaaaatggagataagattgcctagaacagcacctgctaagctgcagagagagaattcagtttgtgaaaacatgtcttaaactgtaaagtactatgcaaacaaatataaggcagtggtatggcacatattgttggccagatggctatcatggaatagtctgtttcaaaatagaaccaacttttgtcctccccatgagtctgtcctcagaatcctttccatggccttctagctctggcgagtctcttttctgagaactctgggagcagctgcttatttgacacgtacagtaaatgcagctggaacagccaggaaacatattgaattaataacttctatgagtttttataaaacatgcttattcctgagagaacgtccacctgttttaatagtagcagtgtttcttcacttctgtgttgtcaattcaaaccaagttaacgcctgcaagtcccaacttttcctagctctaagtcataatctttaatgcatgcacaatatactgctttgctcagagaggaatttttatgtgcacaactgcagaagaaatttatcctgaagttctctcaaagcgtagccttttcttaatttttaggttttcagaggagtttcacaagtcgtgatttttttttttttttttttaagaaagaatgggatccttgcaaaatgatccggtggactctattagttctgcaacacagtgctgtgccctttgcctcatctgtatacagacctggaaagtgggatcacagcagatgagacccagagtcccctctaaaatactctacgtctcttgggaaaagtggcaccctcagtttctgaaaggctgactgttgctgcttttttcactgtctttaaaagaagactgtgttttattctgaggagaatggagtagaaaaaatttatttcttcctggacccaaaagatacttgatctagaacaaaaattgagaaaacctgaagcaagattcagaatttattagatgaaaaatgaacgatttcctacttttcattatatttgtaccaggattttttgttattccagtaaaaccaaaaagctttacatttgttttctattattttgcaaatgattaagtttttattttatcatttcatttaccacttaagaacttcaagcgatgatgatggatttttttttttaactcgttagttcagctaaaacctgggttcttgtgtcatgaccaggaaaaattaggcatgtggacacattgaaaggtgaggagagcagaatttattaaaagaaatctctcaggaaaaaaaaaaaaaagggtcctgccaacaggctcccacctcacaaactgaataccaggccaccacacaggagctgaagaggccagactcctccccactgcatagtgcaagaattcccagtggctccaccgcattctcccagtgctcaggcaggcccccagtcagctgcaggcacacccagacaaggccctgagcaggttcccttatcttcctcctgcatctatcattcccccctctaaagtagtacatctaactgccattagaataaggataaggaagaggatgaagaccaatcttaactgcttcctgctgacagaaggtgctgttttgggaaaatggcagtcagttctccctgaaaggcctatctaagggtccccagcagaaggggccattgtctgaggctctgattccatgacgctttggagtttaatgtcctgaaggtgagaagagacaaactgagttattagaaaacacatatcaaaatgaaacaagctggggtaaatcccgaggccttttaccagtttgtacagggagagggaagccaaaagcccaactggttaaaaaaaaaaaaaaaaaaaaaaaagcaacaacaacttttacccttttgccagcatgtcaggcttctgggttcccttctcctgaactcaatccttagccaaccagtttaaggtttgagaaattaacttttcccagtttggaggatgcatccgaggggagtgtcccacagtatggcaacacaattatatgtgaagagaggacagaggcggaaaaaggaaactcaggagttcaggatgcattggaaaggggtacagactgaaaatgaatgactactcatctagaaagaggggaacaggcatccctggttcttttctcttccccttgaatacccgggctacatgagagagagaaagtgagacattcctctttcttctgtcctcgcatccctgagtcctggtgaccatgacgggctgctgcccatgggggtcaacgcgcctttaacccatgttaacagggggatctagggagtggaaatatccgctcatacccatgtatgccctgtcttccctggtgtcaggagccttcgagttccctagacctcatttatgccatggatactagcgtgacctttatccatgaaatggaaagcttggcttaattggcaggaatttgtcatgatcacttgcgctgtgccttttaacttccattatcgtctgcctctggatccctcagatccagttttctttccaaggacttcaacgtgaagcttggaatggagtttgggaccaaaaatgcatctcggggggttgtatggactccttatcataagctgaatactaaggtgaagctgtggaattgagtccctccaacaaaggagagaaaaagatgtcttgtgacacgcccagataactggtggctgtagttatgcttggtaagatttgtgtgcatggggcttggctttggttagccctcttggtcttactttcccaaaaaggaaacctctggatgataggcaccctatttattcccatcacctggcaggattttcaggataattgctcagaactagaatgttgatccagatatatacattacccatccctcttgttccttctcagctgcaactggagattgttggttggttcacaggaataagcagggttagtctaaaatgtaggcaaaaacttaaaaacaactaatgagtctagaatttaatgtcaaatgtgaaagttttgaaatgtaatttctctccagtcctcatctttgttaaaaaaaaattatgatagcactgagttgtttgcaaaatagactttagtcttatacttggcctgattatttgcataaagtgcaccaagaataattatttctacttaggccttttagactggctttgatggaactctgtttcacagggaatctcagataggactttctaaagttgagcccagccatgggtttctaccctcaaatacctgtgaattgggtaaacttctctcttcttgaggtctcaagagcatgtggttcctgggcctgctggaaagtaacttttttttttttttttttttttgagacggagtttcgctcttgtagcccaggctggagtgcaatggtgtgatctctgctcactacaacctctgcctcccaggttcaagcagttctcctgactcagtctcccaagtagctaggagagtgtcattctttactcaccacaggttaggaccctatggggactgtgtagacaaggtatgaggccggttttaccaaggggatttttatcagcttttcaagttgagcttgattccttaaagggaagcataccctttcagtcaaagccttagtaaaacaactggtttctccagttgtgtcctattgcaaaagaaaatggattcttatttcacttaagcaaacaactatgttgccataagttaagaatactcacaactagtttctaaattctggagaagccaggcagagagagacaaacatgctccacattttgttcacaggatgtttactcaattattaaaggccattaatagctccaaataagttttcttgactctgaaagacaaaacaaggatcagcaatgttccaagcaaaagtaaaaaagattacttaggttttctgttgttcagtccatttggttaactcttgttttgcttgatattcatgaacattttagctctccatgagtcctgtatattttttctttattccaatgtcacagtctcccaagttatcagaaacatgcatttgagagtgcctgtcaaagttccatagcgtttgtaaaccatcatttgaagatcaaaacaagacaacaattatctgtgaataacaaaatgtctatggtagttacaatcagaaattgacaaagaaatctggttatctctgtggtttacaataacttaacataacaatcttaattgtgattgatagcatatactcagacattagaattttagaaataccatacaattttggaacatatattactattcttgaaaatataacctgaagaagattaaacatcattttgccaatcccatgtacctaaacatgtgaggtaaccctgtttacttttcttcatggtgctccggggtcctccgtagcatccaagagctaagaaagacaactttgaaactgaaattggattttgggaagcctgttaaatatgttacaagtgtaaaacccttgatgttatgaaatagaattccagattaccataagttatttattttgccaaaatgatgactcagaaattttaaaaagcaaaacaccttttataacactttaacaattttgctaaagagcagattagtgccttaagagaaacttgttgtgcttttatttcaatgctcaatttatcgaaaagccatataatacccttttgaatttagtcagtatgttcacacatggaatttcttttgcaagattaacgtttacaatccttccataacttgtttaaactttgagctttatcttaactatttcaaaacaatcctttaactctaggcaaaaatttacattttgatgggatatgcattttacccataatcttaaggttgtttttacttctcaaagattaaagacccatgggccagaaggtaccacagcttttatcttccctttaagaaatatttgatccaagcacttatccttctttaagtcagttaattagagctcttttttttaatagacattacacactcaatacatatataactacacagacaggcagaagatccagtagctataagattttttgtttgccatctcctaattggattattggcctctgggtggagccctttaagagcaagggtaggaaagcatgtagtttctagggcctaataaacaggtatagctgacaaagacagactttgacagggatccatctgcctgtaatttctggggctccatgaggaaaacaggtctctcccaaaatggaaactgtggtaccttttctgttcttccaaagcagtcccaggccatcagaaattatcttagggcctctcattcgtgcattaagagtgacaaggcaaggtcgggcgcggtggctcatgcctgtaatcccaacactttgggaggccaaggtgggtggattacctgaggtcaggagttcgagcccagcctgaccaacatagtgaaaccccatctctactaaaaatacaaaagtagctgggcatggtggcacatgcctgtaatcccggctacttgggaggctgaggcaggagaattgctggaacccaggaggtggaggagattgcgtcattgcactccagcctaggtaatgagcaaaactctgtcaaaaaaaaaaaaaaaaaatgagtagcaaggcaaaatggagaaaaataattcagttgactgagaaaaaacctttctccaaaaaaagaaaatccaaaaagagaaaaacataaaggccttttaaatatacctataacttggatatccacttttaattaagctgagcagtctttaagaaaatccttttaaatccctttctacctgactttagctgtgccaagcagccagtattcctggtttttgaaccttaccaaaggtaacctttcaggtgctcagagagaggaaaattcagggctgtttgtggaggggaagagaatcaacaaatggcaaagatcacatagaatgtcaaacgagaaaggactcattttctaagccaggactgaacctgggccaccatcgcaaaatggtggaggccaaacaaagcattgccatgtggttacaggtcatacttccaaggacgtaaaacaagatggaggcctgcagcaaagtttgccactaaccagtttgctgggccagcttcaacagtgggcctgtagagtcctgggcccgcatcccatcctaaattacccctctttctgacagaaccatacagtaaaacatggaaagcacaccatattggctacagcttaaggccaactcatcaatccctttcgataatcaaaactttagagagaatataaacagtgatagctggggtcctggtctagtaacacggcttctaaaagggaaaaaaggacctttcttttaaaagttaactcctgacccagtggagaaaagaaaaaaacaaacagctgtaagtgcaaggctgtgttaactgctgacagggtggagaaaaaaataaaaaaataaaaatcagccggaactgcaggtttggaaagatgccatggggaagaacctcttattcttatgcatgtaggtttctccaacagggagatgaacttctaattgccgtttcttccctggggcttggatggagctctactccttggcccggggaggggaagactctgtggacttgtattggagaatgctggccagcctgccacacaggcctttgggccatgtgccccagctccagccaggaggtgaggggtccgggagccgctgcttgcccatccatcccacgcatgtctgtggctgttgggtgaggtggtgccattacagtcccgaaaagagaaggacaatgccatagaaaagtccgggttggaccaaggccgacatttctaaccccccagagcgacagggttggggatgcagtttcctctaccctcagaagaagtccaaggacaaaaagcctcagaaaaaaaaggggaaaagattttttgttctgcattttacttacctttcctcatgtccccgtacaggccacgaaaacgatgcaggcttttttgctccttagttcagctaaaatctaggttcttgtgtcacaaccaagaaaaattagacacatggacacattgaaaggtgaggagaccagaatttattaaaagaaagatctcagcaaaaaataaaaataaaaaacggggaggttctgccaataggctcccacctcacgtattgaatactgggccaccatgcatgagctgaagaggccagactcttcccccttgcataaggtgcgaattcctggtggctccaccccattctcccactgcacaggtgggccccctggtctgttgcaggcacacccagacaaggccttgggcaggttcccttatcttcctcctgcatctatcaatggtaaattaaatagaaaagtaggtacaggttgcttattcatcaagtatatgttttaaatatgaaagccttatacaagacatagcatatttgaaatagcatttgtaatttctctgaagcagggtaactagaatttgtgtgctttgttgaactctgatcagcccaagtgctaattaacagtggatgataagagactaataaggagtagtagttctgcagaaagcactcttttgtgattactcagctgtctgttctaagatatccacataaatcatttgatcattttgtcatatttcagttccttaatttgccattattgatttttaatttagctgtgacttcactggtaaagaggaaagtaaattagcaatttgttcttattttatgccacttctttattttggttaaaacccaaaacctatcaattctaaaaatagtgatcaaggcgcaacacatttccatcaccccagttgttcccctcccctgccttcttccggcagccatcactgttcagggttttgttttgcttgggttaatcataggttagtttttcactttctagaatttcatgtaaattgaatcatgtagtatgtttttcttccacataatgtttttgagatgtatttatgtcatctataaagtcattcttattgctgcataatattccattgaatatactacagtttatatgtcttttattgtctataggctgcttctttgaatgctaccacaagtctttctgaaaatgtaataaaatgttttcattttattgggtaaatatctaagaggggaattgttggaccatgaggcagatatgtgtttagtcttagaagaagaaactgctggacatttttctaaagtagtgacaacactttacactccttccaacagtgcctgagagttccttttacttaacattctcaccagcattttgtgttgtccatcttagtagatgtatactacgtgattttttttttttttttgagacggagtttcacttttgtcgcccaggctggagtgcaatggcgcaatctcagctcactgcaacctccgcctcccaggttcaagcaattctcctgcctcagcctcctgagtagctggtattacagacatgcaaaatgaaggtttttcttcagaataagctatgttgtcagatctttttttggaagccaatatttaagatatactgatataataagaaaagaaaactctgcagaaaaatgaagaaaacataatgtaaaaggaaccactacacctgtctacttttgtagttttagtagacacatggtttcaccatgttggtcaggctggtctcgaactcctgacctcaggtgatccacctgtcttggcctcccaaagtgctgggattataggcatgagccaccatgcccagcctgtgtgatttttaaatatataggtgtagtttaaaagaattctatggttgattcaaatgtgatgaattattctaagttatacctatgtattttggtatttttaaataagaaaatgcatagtcttttgaaatgtgcagaaatatttttgttctctggtttgagtggagaaatttgataaatacaatatcaattttgaaaaataactaggcaactatgatccattctcacatttaatatggaaatttatgtttttaatagatgtgttgattagtcaacaaatgacagtggtgtgtcatttcttcattgattcattcacttacatatgtttttttctttgtgattgtctagcagcacagtcctgtagggctttctgtgttcatggaaagatcattctgtgttattcagtacagtagccaccagcaacatggggcacttgagcacttgaaatgtagctagtgcaactgagcaactgattttaaatttcttaaaaaaagtattgctagtgactactttactggatagtgtgtgtcaaaataaatatatttaggtgttatctggtcttttattgtaaaacaaagaaagtgttttccttatttatatactagaaagtgcaagcctggctgtaatcattgcttttaatgtctcttaaatttttgatatttggaattttaaacaaaaatcctgagtattgtgaagttatatttttggtagactaggtctaaggcttagattatttaaaataataaccacccataaaaacatttgttctgctggtcatttgttgctatgcataaaatgaaatgggcagctgattcagttcccctgtctttatggcattggaaagctttctcacatgttccatttgtgttacaggtacatgctttttttttttttaattggtcagatcatttgagcagattgaagttacaaagacagcgaatcattagaaatccagttttcttaaggatgaagtcgtttggtttcaatgattacatgattatgaaaggtgtaatgtctcagtgtgaagaaagaaaacaaaagattctaattagacagtgttctctttcactgtagaatataataggacaaaataaaatattacttgtttctgtttttcccaatctaaaatattttatggttcttaaagaataattgtgactactgctttttttgggtcaattcccagaaatgtggtaccatccttaagtgatgctggagcacagataagtaagttgacagtaaacaaaaaaaaaatgtactttcattcttaaaataatcttttaaaatgatagacattaaataaatacattttgatcattgatttaagaaggatgtgagtccagtgagatattttatggccttcctaagttcactcttggtctgcctagccctgtcttgatgaacattctctcttttttttttttttttttttttggcctcagctcatattaaggacctctctgcattaagcaaacattgacttgaataaaattgtcttctgtgttccatgtttgccatgtttctggatgaaatttgttgactctgtaataaaaaatgcaattattagagctcctattgggctgcagtctatatgtgttccaaattgtgtgggtaaggtaggcaggatcacgtgacctgccactgtgacatcttcatgattcagtgattgcaccctttttgcaagggcctctgttgggagatgtggtgatgtgaagaagaattagtctacatggattaattcccatcctgattgagcttaggttctaatgggaggcagtagacatgtgttagacaaagttacagtaatgccagtggtgagagtatgagaaagcatgagctcaggtatcttggaagcacagagatgggcatgtggagaggctggcagtgaggcatggccttacaggctaggcaggagttttggtgggcagagatggcagaagaagacattctagatggagggaatgacatacataccagcccagagaccagttatatcagaaatatctgtggatttagtctctagagtgtagcatgcacacagagaggtagcactggatgcggggagttggatattgcagagggagcctgattgtgagggttctcaaccagggctggctgtggcttttgaattttattcaggacagtgtttatttacatacttaaaggtaggtctcaattcattatgttttcttcatttttctgcagttttcttttcttattacattagtatatcttaaatattgacttccaaaaaaagatctgacagtgtagcttattctgaagaaaaactttcattttgtagaatgtctaagatcaggcaaaatacaaaatcctccccatcttttttacctttgtagttttcattattttggtagatatatctaaataaatttttaaatgtcatattttattaatatttaaggtgagaatgcttatttcatcatcatctgattaatggtactagaaagtagatttttatttttatttttttagagacagggcctcactctgtctcccaggtgggagtgcaatggcgtgatcatagctcattgtaacttgaactcctaggctcaagcaatcctcctgtctcagcctctttagtagctgggacaacaagcatgtgccaccacaccctgctgactttttattttttttatttttttttgtagagacagggtcttgctgtgttgcccaagctggtcttgaactcctgggctcaagtgatcttcccacctcagccttccaaacttctaggattgtaggtgtgagccactgcacctggcccatgctttttttttttatatcaatgaggacttttagaaggaatttttgagctagaatgaaggtacaggtactacaatatcagagtgaaatttagtttatctgcagttgaggtacttgcattaaattactatagaaaataggaaaaaaaactgttttgtgagggagtaggtaatgattatggttaagaagtttccagataatttaagttctatactgttaaaaatagtaacacataggttgtatatatacagaaaaaaacctataacgtataaatgtaaatataataatgtctaatataaatggaatcacctgaattttattaaaaataaaggatggaactaccatgtagtacttgtcaaaatttatgacatggatttggggattaatattgagcactgaccatgttcctaatactgtgctaagcatttgtctcagctagtcctcaaaacaaccatgagcaagtactgtccccattttgcagatgaggaaactgtggctgtgaggtagtacatatttaattcaagatcacgtattgctaagtggaaaaaatgcaattcgaacctagctccttttgcccatggagatagtgcttgtactcaccagtaatttctcaggatcactgtttgagtgaatgtgcaggtacctaggaggatacccaatagggccaaatcccttgggaaggatatgttgagaagagcagctttgagtacaagacaactttatgattttgcatggaagatgggccctgtccccacagagagaatttccctctgatgcaaagagcaaattataggcacccaacaaaccgtggtcatgtatgcataggtcactggtgggtggtaaatcttgtttctgggaagacttttgtaaccattacctctggaaaatctgaaatgatgataccaaacatgttgcttaccaaactgacctcttccacccttagaagcagtgagaaagttcagtgtcaaggactgagctctgcagcttctcttctgcctctgaaatttattaagtcagtaggccagaccctaaatgatttatgacacagaaagcactcacatggaatacaaatgtctcatagtgaagagcaagaccagttgtgattgtaagaaaataactattaaaatgtgagtattttaggagtatacatattgttgttaaggcatttctagtcagtaatgaattgaaggaggtaacatacccacactaaccaaacttagcatttgtaggccccatctataagatagcagagtcactgcctgggagtttctgaataattactgtctctaaatttttaaaacgttcacagaacaatctgtttaaatgccctttaacgtggttgattctggtgctgagtttagtctgaggactaccaaagcaaaataatttccctgcacatgcccaagtgagaaatttcatcttctgaatgaatggttataaaatgacttagcttcttctgtgtgggtgcttatatctagtttgattttgcctgtggtcagtgttctgatattattatatatacatgtatattattggaaaggagcataaaactttccttatataattccaagttaaaaagagacaaatgcttgccatgcattcagatgttcttacttcaagatttttcaaggtcttctaaccagagttaattgttaactttgtttcgtatcatgcattttttcaaaagctctaagtattgtagtgttctgtgcagctattactcaatatcatctctgtgtcccctttccctgtgctagccttggtgtctagaaggccttgagtatagtttgcttgtttaacagggtatacagaataggtgcattctagaaggttatctatcaaatctatttttctatagactttaacctctcatatcagaatgatgactggttctattgcctagttctggtaatagctctgagtagtccaaagatctttgacaggtatagttgggagatagtcaaggaccttgctgtttgacttttttaaagacctgattaatactctgtattctgattccttactccccgtcagaccataatctgagagaaacctcataacctggccaccaacatggaatggattgttttgtactgtaatgatggtcagatagggactaagaggaactagttttctttcatatgtaagtctttaccttctaactgtataaattgttagcaaaatgttgtataaaatattagaatttttcttttcgatctattttaatatgtgttatatatcataagggttttagcaatattaacatgacatcctacatttttcttcttaccatataattatataaagcaacaaatatttagtggacattaatatatgccaggtagcatttcaattaagaaagcgtaagaggtaaatctagaaccagaatatttcttacagaaaatatcaggatgacagctgattttatgtgtataaagtgatttatctctctgtgctataaattacacccagaggtagtggtagtcaagtataataaagaccaaaagaagaaaaatttggaaacataaaaaaaagacataataggaaagtatttttgaagaaaaaaggcaactccagattaaaaaaaaaagaaatacaatccttgatttacagaatttcaacttattacctcaatggtgcaaaagtaatatacattcagtagaagctgtacttcaagtgcccataaaaccatcatatttttcacttgcagtacaatattcggtaaattacatgagatattcaacatgctgttatgaaataggctttgtgttagatgattttccccacctgtaggctaatgtaagtgttctgagcatatttaaggtagcctaggctaagctataatgttcagtaggtttgatgcattaaatgcactttcagtttacagtgttttcaatttatgatgaatttattaggaaataaccccattgtaagaagggggcatctatacattagtagaaataaaagagagtaaagttgagaatggaaatgcttctgtagtatttgctcaatgggaaactcagcttttaaaacaatgttaagaaagtaatcagacatcaattatagtatagtgaacaagtcaaagagaaaagaatacaagcagaatctcttcactgtatgtaaatactggtgggaactgaatgaaagagaattggatttcattgactaatgttcagtaacatactgacatactgatagtaagaggaaaagatacaaattgtcaaattccaaattaatatcaataaaaacaatacaattaaaaataacatacaaagcagttctctaagatttcattgactaaaacgtaagtacagagacatttttggaaatcagtatatcaagtggctaaatttgtgatgtcattcatatttgttcccttatatagcaaactaaaaatctttgatgtaaagatttaagtggtaaagaccttcttggaatggttagggaaaaaaaaatcctaagtcataatctaattacaggtttgtaattaggaggagggaaatgaaatccaaatggaaagaaaacatgctttttggcctttaaataatgtggatcattcattttaagtaacaagtggaataaagaatagatgtcagtctaaagggctgatgtgttgtgggtaccatcttgcaataagaatactaattcacttatatggttgttaagtagacgagtgcagaagatggaagcaaatttgtatacaaaggtgaatgaaaggaaatagataacagataattaatttgtttgctcattctaacaggtgattataaatctaaaactggaaaatatttttcaaatatagaacagagatgacgaccatcttctctttaaactgatgaacctcatagttttccacatattgcatgttgatgattcaggtgtgagaagtaatatcagaagtgatgatagactagaacccgctagagaggtatttgaaatttagaattggtatttatgagatggttatatttcaggttcatgtatgacagctaagcaattatttgcattcaaaggacattgaccatttcaggtatatatgccttcaaaagcaggaagatatggaataaaatttgagttgttgtgtgtaaattcatttgaaaaattgtaataaagttgttttttcctgggcccagaaagtgaatgtgattaacggttttacctggtacattatattagttatctgtgctgcagaataaattacctcagaacttagtggcttgaaacaacctttactatctcacattttctgtagttcaagaattcaaaaacaaattagttgggtcctttgctttagggtctgtcatggggtgaatttatgcttctctctttgccccctccccaccaaatttgtatgttgtggtcctaactctcagtacctatatttggagataagctctttaaagaggtaattaggttaaaatgaagctgttaggctgaaccctaatctaatatggctgaagtgcttagcagaagaggaaatttggatacagccatgtgcatcctctgtgtatagagcggaccatgtgggggcacagaaagaaagcagccatcctcaagaagacagagagaggccccggaagaaactcagtttgctaacaccttggccttgcatttctagcctccagaaattgttgatttaaccacccagcctgtggtagtttgttatggcaaccctaggaaatttacatggagtctgtcacagtctaagtcactcaaggcttccctgcagaaggatccttttcttcaagcatgctcctgtggttggaggcaggattgatgtctttgcaggctgttgaactgaggcctcatttcctcataagcttttgtttgccactcgagccactccatagggcagctcgcatgtgacatgttccctcgcattatcagagcaagcaagcaagaaggaaaagaaaagggaggaagggagacagagtcaggaagctgtagtcttttataatatgatatccaaagtgacagctggtaacttttgctctgttctattagttagaaatgaatctctcggcccaacccaattctcaaggggaggagattaatttctgtttataaattacccagtctaaggtatgttgttatagtggcccaaacagactaggacaccatctattgtctttatgattgtcagtcattttggtattttaaaaatactataattggattatgtagttaagtacaaatgtaacaacctgtgtatagttttaatgtgtcgctgtaggaggcttaaggtatattaaggcctgtgaatgccaagaggtattgagcataccagacttttaaaaatgttctttgatgaaaaacatcaaatatacagaaagccaagagaagtatataatgcacacttatcactaagatttcagagttgttggctgtcatattcacatcatggtttttttttttttttttggctgtaaatattaaaagtaaagttcagacattgtgacttttttacttctaaatatttcagtagtcatcttgtttaaaaagcatgtcttaccacataacttactatcctagtgatacctaagaaaattaacaattattgcatatccagtttattttaaaattttccttggttgtctcaaaaacgccttttaatagctgacaaagacccactcaaaaaccacatatattctgtttggtctttatgtctcataagtttcttttaatatactggattcccctattgcaccctcatttcttttttctgtgcatcaacttgttaaagaatggggcatacttaaactggtgtacttttctgcctccaaacattcctttagcactaaacttattcccaccagaaacttgcactggaagcctggaagtatattaagcagggggcataacactgataaaatagagacagctgctctgatttgggcatggctgagtgactgtttttccatgcctgccccctccctactcccagccaccttcctggctgaattccagcgtttggcacaacttgaagcatactatttaaaatcatagatggttgagactggaagacggtaggaaaaaaaagggagcagataaagtatataagagagaggtagtaaagcagctgggcaggattcaaatacaacctttcctatgctccagagcaattggctggcgcccagcaaccctgtgctcaatggaggggtgaggacaggttgattgagggacctctcattggcatttatgtcaccagccaaactcttcattgttatttttactagaatgacagctccatgagagtagaggcattatgtgggttttccaccctggtgcctagaacagtgcctggcatttaggcatgcagaattagtactggctgaatgaatttagaaatgaattatgagtgaactaacatttacagagcatctatcagttgtgctttgtgctgctcacataatttataagaaaatagtcatgtattagatccttatgaggtaggtattattgtcacaatcttacaagaaagacacggagctagagagtagtttgaatttacctaaaattattcaaaacaaggtccagtgacctctaaaatgtgtatcacttataccgtggtatcaatgggaccagaaatagccagcagtaatgagagctgggttttaattttctatgtgctgtttgcagactgtttttttatggaaatgattttatggaaatcattttggttttctgttcttcagtctctttatgaagaatatagttagttaaatgttttcatgaatcattttgagggtaagtttgatataagtgtttttaaaaagtatttcagtaggtattatctactatctactttagcatgtagttggcacctttattttgtctgacgttaagaacttctgaatgatgcagtcgagacagtttgctcatgctatattttttagagttatgtaaccaaaaactattatatacttgtccaggagttactatatataaaaaatatttacaatacacactcaaggcattgtgtgacatatttcctactagaacttgattgaatgtaatagtgaaccaaaatgaaaataatatggtacctgattgttttatcaaatagttttcttttaatggtatttgccttaatagaatttgaattttttaagtatagtaatttataggaaaactttgacagtttaagttggcaattccaaatcagcccactcattgtattcactaaagtgttcttccaaaaataaatgagtaggctggcattgtgttttaaacatcgagctaattttggttaattatataaatctaaaagccatgggcaaggcagcaattcagtcttactagatgatgatcagtgaaattgtaagacagcttgctgaatgatgcacatcaagctaataacctgaatgcattgtgtccaaaaggacagtgtctggcagagcatcagataggaagccttcccagagctttaataaggggcttgtgaatgcttgcaaaagagggtacaaagttagaaacagtagtaatggctctgatcagaattcaaaaacattagagaaaaaaatagttaacagtagagaaaaaaagtggtttccatgcatagctaataattctgttacatggtagaaagctggggttgagcagcctcatgggccatcccttacttgctgcttatctctagtttttgtttaaataaaattagagtgctacattatgtggggctttcatttaaattagttgaaattagtattctgccactagcaaacaggaaatacagatgcagaataagaatgtggtgccgctggagagtttagaggacttgactctctaacgacattcccattcagaaaagaattgtgactccctttgtacatgattgtaaagtaatggcacaaattatgttatgagaatttttttgctgttattgtgttcagttggtatagttatgttgatgtatataaaattagagtttgaatttattgaaatctgtgtacaatcatagaagcatttttttaaccctgtatctcatcccttgccttaaaaaaggctgtgactatttagaaaacatctttgtacctgaaagttgtatgatttctttatcctggttaaactgatctgtgattgtctcttggatttattcaggaaagaggtgcatctctccttcatccagattccaccggatgagccaagaatgactgttgaggctattttacttaatgaattaacagatttgactgaattttctttttgcagtgaccatatggttattgtgaagatccatgtaattatttgtagaagtgaatcacagggaattttgattgctgtagactctaaacaactgatccatttaatcagatttttttttcaattctgtacagcctgatttttactagcctatacagtcagaagcaattaaataaagtcctacaaaagacagcagagactggcttaaagctaagttgaataacacagctgggtttttacagtgtttcctttggtctgttactcttatcagtgggcttggtttagcatatccccagaaaattatattcctgtaactgccagagaagtttatataacaaaatgatttgtgccacacacccaggcttgtcctgcaatatcactttagataaagcaaacatttttcaactatttctatttaatacattgcttccagactgttctagtcatatgttaattacaaaacaaatgatgtataaaatttcatttgtttttaattgtctttttaaacacatattgcaaaatcattctttgaataaaactaacatgttaatattttccctctagaatgaattctgtgaaagataaatgtattttataatgtatcacatatgtgaaatagaacattgataggaattatgcaagaaagcatcgcactttttaaggtaacagtacatttgactgtcactgaagttactttatcacatctccacatgtacaagacagggaagcagttgcattgtgtgccaatggaggaagttttttttgtttgtttgtttttgttttttttgagacagagtctcactctgtcaccaggctggaggtcagtggcacaattttggctcactgcaacctctgcctcctgggttcaagcgattctcctgccttagcctcctgagtagctgggactacaggcgcacgtcaccacgcccaaataatttttgtgtttttagtagagatggggtttcaccatgttggccaggatgatctcaatctcttgacctcgtgatctgcccgcctcagcctcccaaagtgctgggattacaggcaagagccaccacgtccggcctggaggaagtttttaaatttcaaaaggagaagtatattttctggacttttctataaaccagtttgttgcttctcttgttgatgccagtagaatttatacaactccagcaacatcgtttgggaaagagccagtttttcctgtctttcacaatagaagttactgattagaagaccctaaatattttttagcattttcatgtccatgataaaggctgcaacaaggggtaaataactttcctcttatggcagaaaatattcttatgagacccccagtgcactttttcagtatggtgtaatcacatgacagttgtagggtaggaccctcagaactgcagctcacatcaagagctgtgggctccgaaagtgaaccatatgttgctgtagtccagagagataccaagagaattggcttctgagtccagcaaacctagattcaagtctgtccctgccagtacctgctctgtaactagaggggagttatagttagcttttactagcctgagttttttgtatatgaaatgagaacaatgaccaatagtgagaagacttttttgtaggactgagtaaaataatacatgcaaagaccccagcccctcagtgctctcaggtcaacacatattaatttccttcgtctctctttgaaggtcagaaaatttggacagtggcgtagaattacagtgctgtgggccagtgtgccatctgatggcagaaagcactaattggatctctctgcatgtcagtgtaacataaagcttggctcacaagatacaaagtcatagatcctttctcaccctcctttgctggtaagaaggctctaactgagattcttgacagcaaaatggatgattaggagtttttatagtaacttgaatgtatttattcttttacctgatgtgttttaaaaaaagaaacctatcatttgtataggtaaaagtaaaattgctagtgttactgaacacagcgtgagtacctagtcttgacactgtcatgagctatcgacactcagacatgttcttttatcctttgattcacaccttcatcagcaaatgtgtgttgagtattaatatatgataccccttttgctggagactcaaaaattagaagaccaaccctctatttataggcttataagcctatcaactccttcagagtagagggttggccttctaatttttgaatccccagcaagaggggggagcattccatacataagagttatgttccatacataaggctctactctaaagagttatgttccatacataaggctctacataacccagaggaatacatgttggtagaggcagatccaggccagacctcctgcgtgctccattaggcccccacccctttgctgttgcagtgtctctttcttctttatagacttatctctcccgtgggacaaggtatgtggtagaaggtcaagaaaatctttcctgaagtgaatcgaattagtatatgatactttgaaagtggtcattacgagggtggggagagcctggtaatcactcgcagtctcagttgtctcctgtgtgttatgaaagagttcatgtccttttgaatctgtggcaaccactggtaaacatcaaataataatttgccagaaactggtgaaatcaaatataaatcaatgtacaatgtactacattctttgttgcctaagcagcatttatgaattaaccaagtaatgagttatgttattttttattatataggttgcataatttttagcacttttcttaccatattctaaaaaccaatagagggattgtaagggccttttgccaactgaactatgaaaagggtagataaggcactgaatatatgactataaatgaagttcaactgaaaacaacctcaggttcagatgattgttgtttaacattttttcaatttcttgagcctttcagggtttttaaagcacttgcaagcctggtgatcaccatgggaaaaacactgagagttattggggtcaccattgctcttgtgattcctttatcaataggttctttatgaaaataaacttggcatgaagggaacactgtaaattctgagggttgtaactgggtatcatttatttaaaagtttagtgatcctttgaaaaacctcaccaattttgtaatgttgtaatttttaagactaaccaatggtgcttatgtttttcctgatccattcagttctctgtaatggctaaaattggcttacctgaccccactcttaggcaaggttgttttcatttttacttacttttatgaaagctatcttattcctttgattgctgctgcttatctttaaaatgacccaattagtctgattgtttacttcttcaaagtgctatatgtttgcacttataacacacagattattttaaataacgtttccttgtggttttgctgtatgtgatttttccccctcagctctgtttccttcccgttccttctaacctcatctctgatttcattgtgttttgtattcctcatattccctaccagtcctttagcttgtattcttcccgccatagcctttgcctcttttttgcagtccagtaaggcccactctgcctattgatgccatgttttgcttatgtccctctcttatatcccttccttggtgttctgcctttttacctattctcatgttttcttcactcttattttccttctctcatcaacactcttggaattctttagtctgctcttgccaaatgagttttaggcaatatcaggatatttttgtcccctgggactgcaccccctccaactcccccactcccacacaccctgtgtttaactgggactttcttccttgttttcttgctctttctcgttggagactttgtcactatcctctctgcattctgctaacacaacttgttcaatgaatgtttgttgcaggaatagactgacttttctaattttatccctacttttatgcacatactcttatgctgtaagatatattaggctggcctgtaggatttatcttgaacaaatttccatttaattttcctattacataaaatggttttattgctaattgttttctgagcctaccatgtaggaaataaataatctataagagatactcagaaaaattatggccgggcacagtggctcacacctgtaatcccagcactttgggaggccaaggcaggcggatcacttgaggccacgagtttgataccagcctggtcaacatggtgaaaccctgtctgtactaaaaatacaaaaattagcctggcatggtggtgcacgcctgtagtcccagctactgtggaggctgaggcaggagaattgcttaagccctggaagcagaggttgtagtgatccgagatcacaccattgcactctagcctggacaacagcgagactctgtctcaaaaataaataaatatatgaataagtaagagatactcataaaaattaatgaaaacttttagatgttaaaatcttaccaatgcttcaaggcccacttcaagtatcactgcctctgcaatgaattaatctcttaccagactgtttccatgactccatttctatgtattttgtagcactcatgaatattatacatggttatctttacatatgtttgtacttcttattagttcctccaaaggacaggagcatctttccgtctcctatagcatttagcatgatgccctgcacagcaaggatacttgttgacataacataacacagatgtttgctagactgaatcgagaggtataatgagtatagaaaatgaaaattcagagaatgtggttattgagctagatctcctcatgaggcaaaaagaagcagtgaagctcaggccaaagattggaccttaaataagaaagcacaaagtacagggtatatcttaggaaacactgatttttgaagctttaagatatataatgagtatttcaatgttttgcagtcaaatttgctaaatttgtgaaggaagaaatgtaaatatatttggtagtgattgaaattatggaaatatacattatttgcccattttgtttttcattgaaaggacgtaagtcactgtgttagttcctagaaccatagcgctcaactatgtttgaataatttgaaacttttatttcagttacatgtaagtaactacagtttaaacggttttccctgcatttacgtataactgcagatactggtttcgtggaggaaaataaaatatgctttctcttatctttcacccgctttttccccaagtctgctgctcttagtaccacagtctgctcctctcctttggaggttataactagaacagggataaagaaaaagcagagaggggtccttgtgaacttagagaactggggaaaaagaatgaagtctcaggagatgaagggagggacagacactaagtggaattctcaagaaaatgtctctagcaggtgccacagctctagcccaaggagcggagactgggactcagtttctctttttgctccttgctttctcagctaagctctaactgttctctcaaacatggtttaataaagattcgtctaaaagaggaattagtacacacattaatctgtgactgttagctttatatagagtttaccagaggaaacagctcatgcacaggtgtatacgcattctaaaacggaattaggctaggtgcagtggtgcacacttgtaatccccacatgtgggaggctgaggcaggaggattgtgcttgagctcaggaattcaagaccagcctggacaacatagtgagaccctatctctacaaaacataaaaataaaaaaattagttaggtgtgatggttcacatctgtagtcccagctacttgggaggctgagatgggaggattacttaagcttaggatgttgaggctgctgtgagccctgattataccactgcactccagcctgggcaataatgtaagatcttgtctcaaaagtaagagaattaattttattattaatacatacttgatatgctaaggcaatgtgaaaactcccattcttgttatttctgtgtacactgttttctttttctttactgtaattgacattcttttcggtattgcttgtaactttcttcccatgttaacccatctaggtgaataagtaactgtatttataaattgaaaaattgcagaacaagtcatttttatttctccagggaaataggatcacattaagtctgatagtagttagccaaaagtgcacttcagaaaaattatgaaaatatagcatgctttaagatttcttttaacagttgttgaaaactagatttattctcccataggagctcagtgaaattttgttaaaggctaggtttatttactgttattaagtttacattttcctgatgcaaacagattattttagggtaaaaataagatatttttgtcagttttaagccaactgaaattactactttaaggctgggcacgatggttcatgcctgtaatcccagtactttgggaggccgaggcaggtgcatcacctgaggtcaggagttcaagaccagcctggccaacatggtgaaaccccgtctctactaaaaatacaaaattagccaggtgtggtggcaggcgcctgtaatcccagctactcgggaggctgaggcaggaaaatcacttgaacccggggggcagaggttgcagtgagccaagatcacgccattgcactccagcctgggcaaaaagtgaaactctgtctcaaaaaaataaataaaataaaataactactttaaacagtgtagtacagaatgtatgcaatgcttgatttgattaaagttaaattcttacttcatcctacctcaaggataataagtgcattttatgtttatattcaaatttgttaacatatgcattgcttttatgtaaagactttgaatctttctggttgatactgtgaaatggaagacctagggcttggctttgctcatattttaattttgaattgttagtcatgaatttttagtgtcttgtttcctctttccataagcctggcataaaatgcatattctcgatagttatcgctcatccaataatgtgaagaaaaggaattaaagcttgccttcatttagtgttctgtcctccaccaagtttcggtctaatttaatcactcattattttgtcttcagataacagcttctgcaatttttcctccacatgttagggtgaaatttacctatttcacaagccaagaaatcaatcttgatttttttcaccctttgacagtacttgtgttcaaaattcaagactagtttcaaagccagaactttatttatttatttattgagacggagtcttgaactgtcacctgggctggagtgcaatggtgaaatctcggctcactgcaacctccgcctcctgagttcaagcaattctcctgccttagcctcccgagtagctggtattacaggcgcctgccaccacgcccagctaattttttgcatttttagtagggacggggtttcactatgtggccaggctggtctcgaactcctgacctcaggtgatctacccgtctcagcctcccaaagtgctgggattacaggtatgagccaccatgcccagccacttttttttttttaagggtggttattggtgagtagtttgcattttagtaaatacatactttgtctctttacctagtagtgtgaaatatagtagtctgcatatgttaacgaatgtgggtatatgtgtgttttaaaattaagaatctagtacgtttgtcaccaaagtttcttaaggaggaatttcttgacaaagccataaaaactgagctttcttgaagggtaagggatttggagtgtggtaggggagaagaaccaggcattatccaaaacttaaaaatgggtgtgggtgtgggtgtgtgtgtgcgcgcgcacgcacgtgtatttatttatgtttatggtcatgcattcctatttagtcttcttgagttaccatttgtaatcagactagggtcctgggaaagttttttgcacatcatttagtacatatgaatgtgagctgtgtttactttacaaataggttatatttcaaaacgtgattctgggctgggcgtagtggctcacacctgtaatcctagcatgttgggagtccaaggctggcagatcgcttgaggctaggtgttcgagaccagtctgggtaaaatggcaaaaccccatctctactaaaaatataaaaattagccaggcatgcacctgtggttccagatacttgggaggctgaagcatgaaaatctcttgaacctgggaggtggaggtggaggtggcagtgatccgagatcacaccactgcactccagcctgggtaacagagcgagaacctgtctcaaacaaacaaacaaacaaacaaacaaaaaacagacttgactctgtaagttctttgagatgtattcttaaaaatatttcctttatgaaataatgttattaatagcatagaattccatcttgggatgctaggaatgtattctccttttggagaatacatgttgtttccctggaggataattcatttcgtgactcacattttgggccttcttttcctgaggccctataggtgaagagctgtctcctgcatttctgggtcttggcctgtgcatttggctttgggtgctgatgactagtatggcccttgatacaaagctagcagggtgtctggcatgaatgctggtgtggggtggggtcatgggagcaaccttcctgaggtacagattattttaaatttggtcaccatttgtgtacaacttttattccctgttacttgcttgaactttagattgcaaataaaagaacacatcactttttatttaatactattttttgtttattttaaaaatttgttttaatagagatgtggtcttactgtgttgcccaggctgatcatgaacttgtttatttttagagatggggtcttgctgtgttgctcgggtaggacttgaactcctgggctcaagcaatcctcatgcctcagcctccccagtagctgggctacaggcatgcagcactgtgcttgggcttacatatgtttttgatgtagatcaatttgctagagatttgaatagtttaacttcatattgcctatgaggatgatctgtagccatgaggattcgaaggtgcattattttctatacagcaatgattcatgttgttttaatagtttatgaatatcctcttcaggtattcgttatcttaatattgcaaagtaacagacttgaacttttttagagatgaaatttaagcttttatttatgagactattctgatttgtagaattttatgccaacatttaccaaaagaaaaagatgatctcgatcttcagtttgctgctatatatccagttcccgtaaaatattttatttttaaagactagtacagaagatattgaaaaatattttgatttcttttgtttctaaagatcaagtgaaataaatgtgattaaatgttactaagttactgaacatacagtaaattgtgttcagagtttgcttgaaataataaacaaatgtaatcaggcattttaactggagtaaaagacagctgtcaatattcttgaaactttataaaagacatttatccctaggttatggtattcatgttataaattagccatgaaggatttcatagtataaaagaaaaataataaaaccattgtctccccttatactttggaagtgctaccgcacttttctcttgaacaaacaataggagactgtagtacacatttgaatgattgacgtttgtttctcgggaacagcctattactgattgtgggaaaaggaggttgcccatacttacctattttcattcagttccacttgctaaatgagcaccattatgtaactgttgttatcagacaatagccctttttctagattttgggtaaagtttgctgggactgtacctatcattagaaagaggaaatctctttctaaggtactgtaataccagtattagtttaattttatactaagtcttttaacttcctgtaactcttttgagtagtaaggataaactctcctacctttggtctttcattagtgtattctgagtctacatcaagatctgtaaaatgcaaatgataagatgcacatcagagttgtaggtatataaataacattgaaaaaaccatacaggcaaatatatccaaatgaatcagaacctgtaattcctaatttatatgcagaattctagtatttaataggaaatcaacaaaatagcacctcactcttctggtgtcccccactgcacgtgccttccttctcctattccaggaaattttcagggtcaaacatattaagactctcataaaaggttcacaataaggactccaagattctgagtcaggtgaaaatcttacattgggctcactgtgctctgtacattttggaatgattttaacacattgtaagagtaagggggcttatgaataatatttaaatagtactatggaattttgtaacccagatcatcccatctttattatgatggcattttatgttaatacataatgtgtcatacattatgtttgttttaaaaaaaaccctaagttgaaatacttttccctatttcaggaattgaattcgaaatttcttcaaaatcgcttgatgtcccctgactcttgggaactccagtttttttccctgatggttgtatagcatatgataatattagttattttcattatggttcatattttctattatttataagataagattggcatctgggcactgtggctcacgcctgtaatcccagcaccttgagaggccaaggcgggtggatcaactgaggtcaggagttcgagaccagactgaccaacatggtgaaaccccgtctgtattaaaaatacacaattaaccatgcttggtagtacatgcctgtaatcccagctacttgtggggctgaggcaggagaatcacttgaaactgggaggtggagattgcagtaagccgtgatcacgtcattgcactccagcctgggcaacaagagtgaaactctgtctcaaaaaaaaaaaaagataagataagattggcttatctactttatagtaaattgaattcctcataatgtcttctttgcttttatgatttatattttggaaataaaagtaagcccttttagacttaattttagacctcaacagattttcttaccctacaaatgtacagtagaaagttttcttccaccctaacaaatctatttcctacatttaattccttacacttattagaaaaagtcatcaactgacctgtgtactttaaagtaaccctttgcaactgtgtcataagcaaatttctaatgatctttccatttagtgtggctataattgtttaagttaaaaatagttttctctgcttagaagataaacagtgaagttagatgtgtactttagaattatatgccctttatctctgtattagtccgttttcacactgttataaagaactacctgaggccaggtgcggtggctcatgcctgtaatcccagcactttgggaggcggaggcaagtggatcacctgaggtcaggagttcgagaccagcctagctaacatggtaaaaccccatctctactaaaaatacaaaaattagctgggcgtggtggtgggaacctgtaatcccaccttctcaggaagctgaggtgggagaatcacgtgaacccaggaggtggagattgcagtgagccgaaatcacgccattgcactccagcctggagtgaaactccatctcaaaaaaaaaaaaaaaaagaaaaaactacctgagactggataattgactgagtccattaagcagacttaatctactcacagttctgcatgactggagaggcctcaggaaacttacaatcatggcagaaggcaaaggggaagcaaggcacgtcttacatggcagcaggagagagagagagcaagagcgaggggggagctgcccaacacttttaaaccatcagctctcatgagaactcaccatcagaacagcatagggtacaccacccccatgatccatacacctcccaccgggtcccaccctcaacctatgaggattacaattagagatgagatttgggtggggcacagagccaaaccatatcactctcaaatttatctgtgccattatttttcttgaaaatacatgccattgtgaggtaaatttgctgactaaacctatatacacctgtctttctaagacttcaataaattatttgccatttttctttttgaacaccatttgttcttaacgggagatcccgtaaaacacttactatgtttggaaagtttttgctgcttctggctacttgttatttttacaaagatattatttctctccctttcttttctcacctgtattaccttttttttttttttctcatgagctgccttttattacctgtcaagcccactgctttctcttttgctgagtgtacgtggccagggctgggttccagtgctcctagtgtgaagctggcttctacagacctcaaagtttatctgcccttgacattgttatccacatctttcccccaactccaccccagctgcaccagctgccttatctcttgctccacagcgtgacccccctgtgcacactgcaggatcaccgtgattctgttgcctggtttctgatagcccttccaacttggagctttgccttagtcatgctctgtgcccactggctctagctagttcctagccttgacctggtgtgtaccttctctgcttctggttgtctttctgcttcctgactaccttgctgtctcagccctgtgttccttctcgtgtctgtgttggctcttctaagttccctcctgtccttgtgatacactgtgctgggaagacagccagcacccctggggctgactcccttgttttttgtagctctttgaaaattatatttcagtttgggtaagttttactaaattaagaaaaaaaacccaacatgccatctgatcccttaacattattttactatatataaaaaaatttagcgaccataatctttaaagcttggtaattgttgcttaggtatatacatgtgtgtatacatgtgtgttttgtcacttatgtttcaaaatattaatctctttctcacaaagagtaaatattctgtatacattgtttcaagcacaagaaagggaatattgccatagatttcaaaatcttcatcataaacaggcattggtggtacagttttaatagacgaagatataatgtccttgatataatgtccttgaaatctagtcgaaacatttagcaatcctaatttcatgttccagtggcattgaaatcaaacataggagatttcatccatctgactttaggtatttccatttaataaaatggagggagaaaggccaggctcactcatatctttgtggtgggtggtcaggtggtattgatgactatccttctttttctcatctggccccggtacatggcacgaagacatttgaagcaagactgatcaaaggtacttcactatttcttgccttcttgcagttaaaacgaaagaaacagcctacttcaacttctttatctttttctatcactatttataggtatactgaagtctttttcttttttttgcaaatgccagtggaactacttacttctgacccctaaacaatatcatgtttgctttgatatgtatcccatttgccttgttttcaaaacctttttcatcttttctcagacctgcgccaaagacaaaagcctaacttttattttaaaaacttctgaaaaaaacatccgtaattgcttttaagagtgttaggcaaaagatgaaagttattttggtatacttaacagttatcgtttttaagtacaaatttttgtaaccttggaaaatacttaaattgagcagtaaagccagtagtaaaaatatggatgtctttttatttgaaggactatcacatgtcactgaaggcaagaaaagactagaatatagacttaaataaattccaagggtcctttcacacacttatacacacacaccacaggcttaaataataaaggtatctaattcaatcctcactcagtactcctgagagcactttcttgaatctacatgatttttatctcatttgtaagaaacagatgttacattgagttaactgaatttggaactttcattttgatttttcttgctttcaagaaaagctattttaaacaggcttgatacatttttgtaagagtgaggaggtaatgcggaattgtcatagaagttaatgtatatattaatattcctttactttccaggagggatttgtctgcaaaccgccaccaccccttgctattccctcatactagaatatgagttctaattatcaggatttttgtgtgtttggttagttgatacatatcaagagacctagaacagtgcctggtatacattagttgcttagtagttgtgttgaataaataaatagagggagaagataactgtttcaatacctgcttattgctcataatatataatctacaggtttaggtggatatttggaagtaactatccttattctttaataccaggacagcaacagaaatcaggtgaagagggaggtactagttagctaatgaatgagctagaaagaagccaggccctgattagttctttcttcttccactccaaccactggcaaatatctaaatagtccttttaatttaaattaaatgtttaaataattttaatatctgttctaataagggccaagtatacccacggctctaatagtgatagtttttttctcaaagccaaaatatatatgagaggaggatgcgggcaggtggaaaggggacagagatggaaagaggtagagtatttggtagtttttgctttttttaaaaaaattttccttaaaaatagagtagcgtgcaagacatctagaaaagatggtggctaaggaaataaatattatatttttatgtactttcgtgtggccacatggagcagcactagttcagtgtgtgccgaaaatcttagtggccaaaaaaacagcctttctgaaaccttaggcttcaagtatttgtggagggaggaagtcaaagaaacaaccccaaacttcaaaccctgagaaaaacaaagacccaaagaaagtactcaggattccttcattgttctggtcatgccaagtcaggaaatgagcattcagtttggtttattaaaatcatttttaaaggagcattttcccttgaaaagtggaaacagtgaaatggatcagaaaaaaaagcaaagcatatgaaaataataacaacaataagaattttaaaaataacagctcaaattcgtggagaatgtgatcatggaagagaactctactgtctgggagtggaagaagcagtttccaacttcacctccatactttaatgtttgcgcttgaagacctatgaccaccatacttagtagagcactattgcccacataatagtaaagaataatttttatctaattggaaatgctatcctatagcagaatctggttttatcattaaagccagaggtcagaaatgtgttaaaatgaaccataaggaattcctgattttgcaatcaggatttgaaaacaggtaggaaacaactatttcctgtggcagctcagttaaaagtgagcataggaaaccgtttttggaatagtacagcaatgattcatcagtcctgaagtatattggggctagactagaaaaggtggctctgaatttctttgcagagtcagtcatccaaatctactgactagtgccctattgttgctcttatttaaagcctctactgttttctgctgggggaattcttaatgaaaaaataccaaaagacttcactgatgatttatttgaacacattctttgatgtcatcttaacataccattttaaatattttgaggagtggtaattccactcaaagtcagatagtaggtttgaaataaatatggcatggtgtcatgtcagcaaaagcactataacattgccattaattgtcattaatgactgtgaagtatttatagatttttagaatgagcttctgtaaatgtgttctcatgtaaatttctgaaataataaaagatatccttttatcctttgtgaaaaacttagtgtaagagaagtagaagagagggtgcaagtggaccgatggaacagtgtctgtgttcttgtgtctcagtcacacacagcatcagtaagaggtggattgagagggcagtaccaagggcaaggaaaatgattatttctacaatgtgaggaaaaacactaggggaaaaagatgtttgaagctttgatttgttaattacatttatagaaagaagccatattttgttgctgataaaggtcagcatgatgaagcatgttttacatcaactttttgaaaatgtggtaagcaaaaaaaaaaaaaatgctgaaatcagtaacctctaaataacttgtgttcaagattcacattaggtccggtacccatcagtcctcagcgtctcatgccatctgtatcagcatctaagtctgtatcttaatgtaaggataatattaaagggggaaaagttacattatgtcacatacacatgtgtacatatataatctttttcaaaagcaaagccactgtatttatgaataaaaacattcaagtaagcatttagtagtcattttcttaaaatatatgttgtaaagtactgatctacagatgaggcagtaagttcatgattccttccctgaggattccgaataacttataataaatataagtatgctcacacatgccacagattgcagaggcaaataaattgtgctcacaggtgttttttttgttttgttttgttttgtttttttgggggggttttttgttgtttgttttttgtacatagatatagtcattgtatcagcaaccgctgattggcatatgcatgctcggtaaatatttctagagatgatttgatgttagatctttttagagattctgtatatgctcaagtgcatactatcggatatggttttatgacaaagacaacttccctgagtatggaaaatccttaatagaaaagatgtggagtgatttttttttactttaatatagtttacatatgcatcttatacatgtgcatatatgcttaaaaactaccgtcgataaggtcaacagtatcaacaatgaccacatccccatggtgagccttcagtcttgtcctcttgttggcagttgacactacacacagtccaccatggatgctttttcctccctttgattcccagattctgccttatcttgctcccccacttggacttttcttcctcaggtttgttagcaagctcttctttccctgcctaactggaaatgttggtttttttgtagatttctatctaggatcttctctacccttcacttcagcttttgggtaggctcagtcagtcattgttccacaaacagaacatggagtccttactctctgaggacaacctatcttttaagttacattccagcctttctcttgtcgaacatgtttttcaagcttgccctgtccaatggtccctggagttttcagttcactaggcctttattcattcattgtctctattgtgcatattaaaagttgtaatcagtcacttaattgtatcctttaacgtcgtagatttttaaagctatttcttcattttccatgccacgttgttggttgcttaccagacatttcaactctttgtcctagaatcattaacacttaatctcacattagagaccctccatgatttgggccattttctgtgattgtctctaaggtacagctccttgagttttggatctcagtgtgttttgccatcatctgcacttggcataattttttcttgacccagctccaattttatcttgcaccagtaccccaaacaaaaaagtaaattgtggaagactaattgtcatcactgtgctttaaattattttccaaggtatttttaattattttccaaggtatttatctcctcgaactttctcagtttagcagtaactttattcaaacagctcaggttgtaaggtgtacatcaattctttaattcttatctgtagtgcattgtgaatcatggcttgagaggatgaaccttatttagttaggaagtatcttccaaacataaatgattcatttgtcagcaaagataatatcataaaagaaaatataacataaaacagctctcaaatattcccgctaaataatgagaatattagaaggagctacttcaggttaaatattgtgactcaaggccaggcacagtggctcatgcctgtaatcctagcactttgggaggccaaggcaggtggatcacaaggtcaggagttcaagaccagcctggccaagatggtgaaacctcatctctactaaaaatatgaagaaattagccaggcttggtggtgggtgcctgtaatcccagctactcaggagactgaggaagacaatcgcttgaactcaggaggtggaggttacagtgagctgagatcacgccactgaactccagcctgggcgacagagcaagactccgtctcaaaaaaaaaaaaaaaaaacactgtgactcaaaatataagcctttcaaaacaaaaggaaatgcagcaaagagctttttaaagtatgttttaagtgtattgaaaataagaatttcagtaaaacagttgttaaaggttgatttatgtttgttaaatgtattttttaaaatattggtggtttccaaatccttctgtttcttagatttagtgttctgtatataaaagagtatatatttgaatctcaataattatttatcttaatgatataatgtggctgttcccaacctatacactgcagacaccaggggagccagaattcttagaagaaatgttgaaatccatatgcacacaaagttctgtttactgtatacagtaaacaatatggctattgtggtattattttaaattatttttttaaaaaccctttcttctgcttaccattgttttacaaattaaaagccatacagaagaatataatacagaatggtagaattacctataggtccactattatggcagccaccattaagaactacagatctagctgggtgtggtggcttgtgcctgtagtcccagctcctcgggaagctgaggtggaggatcccaggaaaccaggagttctaattcagcctgggcaacagagcaagaccttgtctctttaaaaaaaaaaaaaattaaaaaaaaagaattatagatggaatggtaaatactaattaatcatagccagaatttaaataacactatttgtcagacactgttccaagtgttcttgaatatactgagtcgtgtaatctacaacaatgcaatatggtaggacctttgctatcactacctaacagataaggaaagtgtggcacacagttaataaacctgacatatatggctcctagtttttcctttgggtagactataattctgttatctacaaaaataggaacatgtcatcctctatatactgttctgcaactatcaggtccaaaagaaattccccgtaactctccaaactgctcttccccccatcttagatatcagttaatagtgtcgccatccagtatttctgcaagtcctgttgatactgtctactttaaaaaaatttctctgaattagccacttctcactgtctttaccacttttaccctacttcacaccattattatctcctgcctggacaactgcagaagcttctttggctggtgtgcccatgtccaaggtcaccgacttctgcagtccattctccacccaacagtcacagtaagattttaaaatgttaataagatcatgtgacctgactccttaaaacattccagagttcacagcactctgatggcatgcaggacaatagtctgcctccttagccttccaaagccatgggatccagccccaccatcttcttggacctcacatcctgcaccctctcatctttccttcctccttattgactacatttttgccccattgccctcatttttctctctggaatgtgttgcattcattcctgtctcagagactttgcacttgcccttacctttggcaccttcacgtggctggctactctgtcatttcagtatcaccagagaaagaggccttctgggccgggtgcagtggctcacgcctgtaatcccaacacgttgggaggccgaggcgggcagattacaaggtcaagatatcgagactgtcctggccaacatggtgaaaccccatctctactaaaaatacaaaaattagctgggcgtggtggcgcacacctgtagtcccagctactctagaggctgaggcaggagaatcgcttgaacccgggaggcggaggttgcagtgagccaagatcacaccactgcactccagcctgcaacagagcgagactcttgtctcaaaaaaaaaaaaaaaagcggccttctggagctattttatttaatggatcctgtctcccccaccctccccgtccaatctcagtgtctgtcattttctttgtaatacttccctctatctgaaattatttgtttacttctgtattgtctctctattcgccatgactatagaagttccatgaggataaggacttttctccttctagtttttctcagtgcttagaacagtggggcccaccgtagactttcagtacttggcctagttaatgaataatttaaacacaccagcatgttcagatcagtatgtgaggatgtttactgatctgctgtttatatggtcctccaaattctcgctgtgctctaagataggtgaatgaatgtttgaattgattacatatggaaaaacagaaaacactgtagccggtgatggtggtggtagaagcttttatctgattaagtaatagtataaaagataggtttgtttaattcatattaagtgagtttaaaaaatacgactattttttacatgaagaatttctaatcactgaaagtggatcagtcgctactgttttgttatgaaattactgtaaggatgggaaagatagttttacatatgataattcctggaacaacacggtgccttagagattctcaatgagccaatttctccaggcattttttaatttgtaaaaaatcattttttttcttacgtagcttcttgttacttctccccaagcaccattcttttgggcaaaaacatagcacactaagtgtttttgatgattggctagtgtatttcctcctgactgtcaccaaaatcagtataaacctttggttaatcttttctatctctttactgagtcattagatggagtatatttagtactgaaaatagttgcagcttgcttgtgtttccctaagagaaatactgtctttacaaatggaaataaaattttcactcatttctgcctttataatattttaacatttgtataaaatcctctgaactacctttgctgatgataaacttctttctgtgaacaatgtttctttgattattaacccccaaaatgatgagttttcgtagttttttctaactcttcaatattaaaatggtttggagggatgcagaataccatctattgcttacatttattcagacattttaaccaaaatcagcagcacagatattatatcaatgtaaaaaagattttaagtgttatataattagctgatttagaaagaataatattttattcattttttatgtttgatccagatcaaacagtgtttgctgggtttcagaatacgttgtttttaatttgagtttgagctcaatttggattaaacttgatcaggacaggctattccatttatttttatacttttatcttaaaaggatatcttggaaaggatcttagctatcatctgttgaacctctttttgctgagaattatggcccagagaggagaggtgattttgcaaaggtttcaccagttaatggcagagctagaactagagcccaggcctccttagtgagcctccattcctgtctttgatccctgcatgtttggccctcagtttgggctttacatgctatgtgtagatgtttggtaaatttattattctctgaagttgaattttgacatacaaatcactaaacatgctttgtattttaaagacattcagtgtctaagaagaaggtgagttcaagatctgcctccccccattttgtgatatgtataatctaaatgtgtttcttaaaactggatgcaaacaattttccaaccatgtgccatcttttagtttcaaagataaccacatgatagtgtgtcaatagagactagagttttccaaacccatctatttttgtgacctgtctcttgtgttaataatgcatatgtttgcaagacagctggctgagcttttgacaatagtctgtccctggattctttttttcctctgtgcaaagctaaatgaaccatatgggaattgaactgataaccttggcctcattaatttaccttctgtaaaattgacttttgtaaatttatgttctactgtaatgagattaggagtgtgatttcattcactcaataaatagtaccaacactgggctaaaggcgttgggaacacagagatgcatacaataaaatttttgccctcgagggattaggataagtgcacaagtcactaatacaagagcaagagtggtaactgctaaaggagaaggattagcaaaatgtgaaggagttaggagaagggagagtggtacttcatgctgggggaacatcagggccctttaatgatggacagggtttccagtgggagtgagggagaggaaatgctaggtcctgtaaatggtggttgaccagaacacttcaacagggatgttggcatgtgctgagcataaggttaagcattatgattagaccctgaaggagaagactgatagtagggagaaagactttaagtgtcctactaagatttttatttatggtggcattcggaagggatgattgaagatttctaagcatagaagtaatacagtcagaacctttatcttcagattcgtcagcagtcactgtagaatgaactggaaggaaaagctagagttatggaagaacccttgggaagtaacaagggcctgaaccagtgttaccaacagtgggatgcagagaagctatgtgagagtttgcaaagctggactgagcaggacgtggtggtaactgattagattggatagttgaggaaagagtacaaggtttgaacctgggtaactagcagatggcagtactctttcacaacatcaaaatctggagaaagaaagtaaatattgttttgagcatgatatgctcaagaagctaataaggcagacttgaaattggaacacggggtagaggttggagctggctgtaaggatttggaaagtcattcaccaagcgagctgtttgaagctaggattgtggatgagatcattaagggatagagtatagaaataaaagaaaaggaatgaatgcataagggtcattctggcaggggctgtcagggagtggagatggtggcagggaacagagcaaagagaaaccagaagatcagctaggaagcttctgcagaatcccaggtaagaggtgttgacagctcgaagtagatggtgctggaggagtgtttggagattgatcagaatctgaatatgttctgtggataaaacgaataaaatttaacagattcagggctaggggtgttgtgtgagagaaagagaagggtcagagacaagtccatgctttttagcccaagcacggactccctgccttaatctaaacatggtgttctcctcatgcaggtgtctatgttccaatttcccctgtatataataacatcagtcctattagattggggtccaccctattccagtatgacctcatcttaactaattacatctgcacaaccctaatcccaaataatgtcacattacaaggtactaagggctaggacttcagcatatgaatttttgggggacacagttccatccatagtagttgccgttaactgagaagaggatatctgtgaaatgaacacgtttggaggcagggaaagatctgcaattttgcccatgttgaggttgaggtgcgtgttagacacccaagtggagataccacgtgggcagttgaataaatgggtctgaaattccagggaggggtctgggctagagataaatatttggaagttgccagcatattggtgatattgaaagccaagagactagatgagatcaccgagaaagtaagttgggatagaaaaagaggagagttccaaagactgaaggtaagatcccaataaaatagtactgggatcaaggcccacagaaatgtcgaataaaaatcccgcttatgcttatagttgtgaaaaagcaattacattttcatgatgattttaagttatattctaaatatttacaaaaccgtggcattttcttgtgaagtgtaagatgagtcagacagggtatggattaagttttactggctaatatgttgaagaagttactggtgcagaaatggaatgttttgaatgccataaagaagtcaaaggataccaataaaaataataaagagcacttttctcagaaggagaaacaactttggagaacattatttcagtccttgatttaagaagtcattttctagaaaggcagtcatgctctaagcagctgtatagcttgttctttcctctgtttttcgtgagagtatagttcaaaatactttaaacaaatattaacgcattattatcacattttagcagacttgaaaaataaatcttcactgtaacataaccattttagccttttcattgacatttttccatgtttctgctgtttggcttggaggcaaaagctttgacagcaaggtgatagaagtgacatacagcaactctatccagttttctgagcccatccagctcccatttctctgagcccccttctgcacattcttccacctctgccccctttcttactctggctctcacctagtcatgcttcaaaactcaggttagctgtcacatttcgggaagtgttttgtaattcctttattcatagtgtgctgcccccgttaccctgcaccatagtgcttaccatagtgcaccatagcactgaccgtagcgcaccatagcgcttaccatagcgcaccatagcactgaccatagcgcaccatacactgaccatagcgcaccatagcgcttaccatagcgcaccatagggcttaccatagcgcaccatagcgcttaccatagcgcaccatagcacttaccatagcgcttaccatagtgcaccatagcgctgaccatagtgcaccatagcgcttaccatagtgcaccatagggcttaccatagcgcttaccatagtgcaccatagcgctgaccatagtgcaccatagcactttccccagttctactttatgaagtgttgctactagatcttcataatagtttatgcccccaccaactttgagggcagagactggatttttgtattttttctcttggtatcttgcacaggatctgcaggtaaatattcaagaaatgtatgtgaactgcaaattgaaaaatcaacttgtttgcctgcttggtacatatctaaactgtcactgaactatgattccttatcagaagttaaaacattttgtttagggagtgtcatcaactaacacagtactatataatatatcttgagaagattccccttaaaaagtattcaaacagattgttgcctaaagggttacatttgtccctaaaaactgtttcccagagagcccttcagtttcttaccatgaaagatacctgagatatttaccctgtttggttttttgttttattattggctgtgtcccttcaaattagaaagcaaaatgaaataattagaacacatctatataagataacatgaaaaaatgcgggagcttagagggataaaattactggcagttgagacaagataaaatttttttaaattagtggattattttggaaaggggaggtttaaaatttttttggcataattgagatctgtgagtctgaagagtgttgagtaatattataatagctctttgatgcaaaaataaaaggacagcaaatacatccctgatgacttggttcaagattctttgccctgcccacttaaagtgcaaatagtgtgattttttgataaaccttctccaaaaataggaaaagaaggaaagagatttacatttgattatttcttatttctcagtactgagaagaggctttgctacacaataaccttgatagcattgctccactcatcgggttttacctttattttgctaagtcacatagtatgtggtcattacacactgaattcttgtatcgaaccatgattattgacaaattttgagctaagctgtgcagcatgttaaatgtgcctttacggtgtagttatttaaatctcaatttctttccccagctctactttacgaagtgtttctactggatcttcaagaccttcaaaaatatgtttggtgtgtggggatgaggcttcaggatgccattatggggtagtcacctgtggcagctgcaaagttttcttcaaaagagcagtggaaggtaaatgttcatgtgggtgttccttttacatattttttcctagtgtgtagtttacttgtacagctaatgctatagcattattgggaattcttcaaaaagatttttgatttaatctgtcagtgataaacagtaatagtgccttgtataaaaaccacctggagattttccacaaagcaatatttaatgagcaaaatttgaaattctgagcaaggatcaaccaaagaggattttttgttgtttgtcacagtttgtttttcagtaagactcagaaaaataattccttgtcattgtaaatttaatttatgtgatctggaatagaagttttactaggcacacacagaatacatgatttctgccttttctgggtttctgtataaatatgtgtttgtggcaaattaaaacgttaatatcagaatcaagtctgtgatttgtgtttcatacagaataatttcatttaccagctggttcaagctccaggtccctgtgtgagtctcacctttattcctcctgaaagtttccaaattttgcatattaaatgaaaaacctgactgagattcactatgcacagttaggctagcttttgcttctgccccaaaatcgtactccttaaggagaaatggtctttaatttatttttacctttccccatcctcacttataagcagttagttaccatcagacttagaccagatggttttattgatgttgcaaactatgtctggtgaaagtgtagaatttttgctattagtaaaagattcattgtgtaatggacaattacattcactaaggggctccacatgaagactccctaaggtttatttctcagagaagttttcttagagatgacttggtgcttcagaagcttaaacataagtggcttgaatgttttccctgtgttttgccagagaccacaaggtcatatctttagttgtggaatgaaaaagttaaccaagtaattattctttctcttgagattgattttgcattaattgatattacatgatttttacattatttacacaattaattatttggtagtcctcaaacctagcattgaattggtaaaaggagctcagtaattctttctcaggattatgagctcttggttacaggtgatagaaaatacagcaaactggcttaagcaccgatggaaattcattggctcacatactggaaagtcccagcgtaggcttggcttcaggcaagccatggtcttaagccaggtcgttagaactcaatcccgctcgctcagtcgcttggttttgttctggctctgttctcatgcacgttctctcatggtgctgagacagctaccagacctccattaaaaagaggttttctgttcctagcaattcctataaaagctcccagtggaatctcctcagattgaacttggctcacatgcccacctctgccccagtgcctgtggctggaaaatgtagtgatcagataggctggttctggctggagtcggacaacctgaaccatctagaccaagaatggggaaggacgtttcccttaggaaaatgtgggttctgttaccagaaggccaatttttcagaaagtaggaaaaataaatttgcacaatactgaagtcagtttgcttttgtgaggcttcccctgcctccttctctctttccttaattagatgattggttcagtaaaagataaataggtgagatttacatctggcatctttctaaggccactttgtgctttccaatgtaagaattcctctttctggctcacttaattagtaaacaaagtaagtggtatgtcaaaataaagtgatgtggagaaggacattttggagcaggcagttggccagctggccctacctgtagatccaccttcatgtcagaacccacattttggctgtttgtagaatctgccccttctctacttctgaagcaaaaggtttctagaagttcttgcttagtttttcttgttttaagtagtttctgtggaattacctagggaattatttttataactcagttataaacatacaaaaacctaaatgcaggtgcaactttttccttcattggaaagctgatcgatccatggataatgaaacttggtaaatgccttttaagacttgtattaatatagtttattttgtattgatttgggaattagactttaatcattcacctgcttgaaacaatgctgttaatttaaaatctaaaattcatgagagtaaagacctatttgtttttgtgtttttgtattttttgttagtttactcttttatcccatgtgtatgagagagattaaatatgtgaaaaagatggctatctttatataaaatattttttaattaatgagattatttttataaaactttataatatttgtaaaactcatttcacaaaatcatggtatataggtgtcattttattttccttttctagatgaagacatttaggatcaaacttagtccacccaatctattcctaatcctaaggccaaagttagacccttactcaagtcataggactccaaacctacacctaacctaaagtctggattctaaatctcataatatagccttgctattttgccatatcagttcttgagttcatgaaaattataacctatatgttagtctattcatgcctccttgactctaataaaggaagtgatctaagcactaagaaggcacagtttagtagtcttagtctgtgtatatatgtgactttgtatgtatatacatatatatgtatggatgtatgtttgtatatttaaatatttactaagtttgttttccaatgtcccttgacatccctaagcccctcgttagattacagaagcagagaattctgggcaaagtgggtagagggagctgatttgagggaagtcatttaaagctaaaaggaaataatggcaccaggaacagaacatgaagataatccctagagagcagacaagaggaaaaacacaccagcctgagttttgagttgatgtccttaaggctttatgatctagagtgtgtcaccctaaagcttgctataatagcatagcagtgactatgcagactgtaaattatgattttaaagtataaatttttgtgtgtgtgtgctctgtttaatgggatgtatgtgtgttcttattttcttcttcttaaacatttaatataaaaacacttagaactgtcttccaaaataacttatttgccaataatgtcagttagtagccatattattgtaccttacaaatggtttatacgttcattttaaatttgaatcacttatttgccttgaagattttcagaaccttcctgtcttaaagaaataataataacttaaaaaaagggttctcccttgtggtggaagctagactggcttcaagggtcagaaacctagttttaattttttacgtcactcactaggtgtgagattaaggcaagttatttaaaacttctctgggcctcagtttctttgtctataaatggagaagtagtgttgccctacccgaacattgctgtgaaaaattacctgaaaatgtttgtacagattttataaattataaagtagcaccaaaatactagattattactatcctctatgaacaaatgccaaagttcctggtgatgttcacgtagagagatgatgtaaatgatacaaccacattgagttgttaggtcgtcatttttcagtccttcattttcctttgttagatcttcattattcctgtaatgttattttgtcctgagagctgccctttgaggtggcaagatccttctaaactagcagttctcaaaggctgtgtgtggagaatggggatctgtggaaatgtcctagaggggcttttccagtgcagactgaactgttgagatttactcctgtaacaagcctctgtggcagtcccacagttgggagtctcacagttgagaaaatactgagagccctcaaccaggctttgcctcttctgttagaagtttttagagaaggcagagtcttatctcaataatctagcaaggctgtggatatttagtagccaccaaataaatgtttgaatgaatttccatgtgacataagagcaatcaaggttggatgacttcccccacccagtaaattgtcaattgaattagctgaagaatttgtgtaggccttttgacttctaatctgtaatttctcatttttgtctgaattttgactttcttagtttctttccaactgtaaattgccattagttccatctcatctgtgttttttactttgtgattcctcagtgaacagagttgactagattcagcacactattttataacctaatttcctttttgaagactcagtatgtatgcagtgtctggaagacacagctaccacaaatctctaaatagttatatggctgtaaaagagaaagagagctcattattatgtaaagtcaactggatttaaattgtttaagcagacctaagagtccatattttggtaaggtcagccaaattgtatgatgtcagtttccacactcacacatttcccttgaaggaagagacttaggtctatatcttgaaactaaatggctgtaaaagatacaattacaagttaatcttggggtttttcaaataggcaatattttcagacagccaagcctgtgaacgagtacctcatttcttttccatgtagttcagttcacagcatacattttaaagatctttaaatttatgattgtgtattctatgagagaaaatatttttaaggaaatgtagtggtttatgaatcattagttttctttggttctttaaaattaatgagtaaactgaacagttccagaggaaagtgtgtttcactgtgtcataaaccacattatccctgtcaatgctgtgtgtgcacacactcatgagcaagagggaagaacaagtgagggtgccagcaggtgggaggtgtgtgttgggggggggcagtgagcatttgtgccacaaaacagagaacttcattgtagtggactcaagctaaatcagaatgttattaatattaatattacgtaataattcaaatatagctatctccttatagctggcaatgtacagttaactgataaagtagggggaataatttaatgtatatttattagatgtttttaattaatgatttaagatacagtccctggtgtttccatgaatcatgtacaggaagcttatgagcatctgagcctattgtcacaaccacaatatttgctgtgtcagatataggaaaccaaggactgtctgcttactgctttcttatgaaacaccttaaagatattttttcttttctcctttttcagaatttaggaaccaggtaacctgactctttctaattatttactgtaagagcctaaataaatacctacccagtaggttatatctatgattttaatgaacactcctttcctccttccataagcataaggctgtcgtgctaatggcaaatgtttgcccagatgtgtgatatcccttcagttggttgttatgggaacacatagagccatgacatttaggccaccctgaaaggtcagggaaggtttctccaacaattgacccccatgctgaatcttgagagatcagacttggccttgctgagggaccttaagaacagactgttgttgcacagggcaccagaagcaattttgtgttaccactgtataaactttcatatgtgaagtgataggaagtgaggttaaatgagcagattgggaccaggtcctggactccaaggaaggtctgaattcatccttaagcaaaacagaacctctgaatgttttcatgcagcagaacgataagctcagttttgcacttaagatctggctgttgtgaggtatacttgtttaaatggtggctgttttcatcacttgagctagaaatgacctaggatggacctagaccagggctatcagggattgagagggcgggcagatagtaagaccatctgaaaagtagcatggacagctctatattggaagagaagaagcaaagatctaggatgactccccaggcttggctgctaacgccgttcactgagataaggaatactggagcaggggcagctctgagggcaagggatgaaaggttcatttgctcagcaaacatttactcaatacctactaaatgccaggtacctttctaagcatagctggagacatcttggacaacgatccctgccttggtagagcttacattctagtgagggggtgatgaaaagattaagcataacaaatgagttatttatgtaacatatgaaaaggtgattggctatgggggaaaaaaaccattgttaggataaaggggagttggatgaggtttggtttaggacaagtttgaagtacctatgggacattcaggtatatctaagaggtagttggatatctaattttgaagcttgggaaacaaggcaagattaaaaataaggatttcagaatcatcatccatgaaagtggatgcagatggccaagaaatcagtattcagagagacagagcaggccaacgttagaaccttaaagaacataagtctagaacattgagtgcatgcgtggcacacgtgtgtgaataactagtctctctccttctatttccaacttgcacacagaaaagtcttagttactttgatgattcaccatttttgctgaacttcagacattattgaatctatgcagttttcaatcctaggtttggttctttatcattatgccttgattattatgaatgttaatcagcccagagccccaaaccaaacatgatattgagggaatctggtttgcaaaccagtgcagaggcaacacccagcttgcagcaggtgctcagagaacactggttgatgtgttgttggtaactacttatgtgaatggggttcgcccttgtttctgtcaccatgccacttgtttctccaaagtggaaaatatgttgaagtaatttattagaaaatgatttgaaatagggatgtgtgagccaaaagtaaattagtattatccaaagacagctgcttgtagcttaaattttaaatcaaggtacaacttcacatggcaaatttgaaaactctaagtcaggagcacagtatgtaattttgaaaattatttcccaagtttatgtgtttgtttacaacccatcttgttccagaaaataatccaaggtggctcacagatttccatgagtcaaaatgaaatttaagtgaaacaaaaaaaacaacaggaagggaagattagagcaagagagggaaaaactgagccaagaatggagatgatataaagaatatatgtctcaaggcctttgtcgagtctggccacttatttggcactcagctttctagcagtcaacccaaagccaatgaacagtcacctgacttatgatgttcttaaaaactagtttagggaattgcctgtttataagaaaattttcatgagctactttggttttaatgtgcctgctcttttcatctgatttgtatcctaagatttaaaaagtaactctcccattggtactaatagaatagtttggtatagacttaagtagtggttttgagaaaaatacttagttctgtctcccacctggtcctataagaatagctactgagtacttaccaggtacaggctctgtgccaagtacttcatattttatctcatttatttctcataatagccttcttaagccaaagtttcatgagtttggaaaggtaatatcgttgaatctaaactccctcaacaattgttgtcatagggaaaacattgactatttcttaacaagacttaaaggtatgatcctttaatttttaaaaataataagtatttattgaggagtttgtgctctttacgctaggaacttgattgtctattcacattttaatcctcttgataattctatcaaatgtgtggggttattatctatcctcattttagagatccatccactgagtcgtgcatgtagtaaataacttgtccaaggtcacccagtaagaaggaagagatgcagttgggatttgaacccaggcagcccaggccttctgattgtatgtacttaacacatcagctatattgcctctcacagagtaatatcagataccaactatttttacccatcaaaaagtagggcaacaactctggctttagaatactcaggaagagcacattataatttaacagttatcttgctatactctaaataattaactcttacccattccaagttgaaaccttaatttgaatttctgttgccttagtggaaaagaaattgggtaatctctattttttcttaaggaatgaacttcatatataaaaaaaattaccattactatcctgaagtacctctttaacatcttgatattaatctaaagctttatttaaaatttttatcttcctgtgtttcatttcctgtgtgtgataaaaattagatgtagcctatcaggctcagagaaccattgggagaatggccttcctcatacaaagctgaatgctactagctctccagctctttgatgtctgctctgtgcctagtggctcagaaaccatacccaagagtcctaggacatgaagctgctctcagagaacttgcactcgtggtgtagttatgatcatataacttgtgtgatttgatgttactgagaatgatttgacaccagaaatggaaattgctaaattgactgtcatcaaatactaacattgagccttggcaggatgggaaggatgggtgggcatttaggttgtcatggagaggaggcaggtgatggaagactattagatggagactgtgttgggtgcggtggctcacgcctgtaatcccagaactttggaaggtttaggcgggtggattattagagctcaggagttcgagaccagcctgggcaacatggcaaaaccccatttctacaaaaagaacaataacaacaacaaaaaattaggcgtggtggtgcatgcttgcagtctcagctccttggggggctgaggcaggaggattgcttgaacctggatattgtggctatagtgagctgagatcacaccactgcacttcggcctgggcaacaaagtaataccctgtcccccactcccccccaaaaaaaagaaaaagaaaaaggtgatggagactggaggctgaggacacctgcttgagcagacccagctctgtgaaaaaggaggaattggcagcactggatggtggatcagttctgaggaatgatggcaacctttgacagactcaggaagaaaatactgaaaacagttgaagaatagggcagatgagtggggtttagaactactgaggcttcagagattagtttgccaaaatggatgaagcagtctggataaacaggaatacaagagcagaaagacaaaactttgaaaaagtttatcctcttcctggagttgttttcttgcaagttttaaaataaagaaactacatagttagctactaggtagtttggcagtagattggcttagccagatgtccacggcatttggggtcatttggtgcagtgtatgggaagttacgtaatgaaattaaaagcctggggaaggtgttgggccctcagtagcaatggaacagggctgcttggtgtcgtgatcactggaaattgtgtgctgttgtcagtcctcgtgttagagctactaaattatgattctagcagcttatgacaccatataaagccacaatatgaagttattaataattgagaaggcagaaaatttctgtgtagcaaataaaaaaagatgtcagtctttcaaggcccctggttttttcatgtaatattttgctctttaaagacatacacatgtagtgtaatagttctttccttttaaccttattcctcaatatctatatatactgcccttcttgacttgttagataggaaaaagagaagctgataatgagttttctagagataagtagttatatgtaaaatataaatacattttttccagagtctgccccacttagacactcggcactgttctgaggcaaaggaacagaggcaaaaccttgaatgttagccagaagacttcagaaccaccagaaattatcgtaaaattacctttgcacatgctcacattgtctctctccctctcatctttctgataccataaaccaaatccacatcaagaaaagaacaggctgacaccaaagaacggagctcacaactcttgcaatgccattttgccctcaggttggccctatttgaagctctttaataaatgctagctcttagaatttgttgactctaacattacatttacaaaagcgtcaccttcctgtgtgtgctgtcttgctaattaacagtgaattcttatacctcacctagcaaagaacaatcccaaggaagagagagaaatgtattttctccttacaggtataagacatttaaactcacacctctatggagtctttaatgtctttactagagcctttagcttcattaaatcaccgacattcgacaacagaatgcatctttataaaaatgtttacttttctaacagcgaaaacatgaaataaagcaaaagatgaaagaatacaaatctaggagggcatcataactatcaacaagattgaaaggtcacttatagcaaatcagctgaaaagtagatggtatgagatttttgataagtctgatataaattcatacttatgtacagtattctagatctagtacaggctcattaagttctttttacttgtttcagtggaatcaaaactatagaatttttttttttggtcggggggaagcaaatacctcctccttcctctcaatccctttttatattttattttcttcttcaatttgaaaggaagacctagggctttagtttggagattcataccaccctcttagaagccgtactgaccatttactagtatttagtgaaaggctgactaacattttgaacccttgctttgagagttttccagtaagtgttatcactggtgtataataaaggcggcaccattgtaggttccaatatcatttttatatagtgttatacagaatgatactgcccactcagagactcagcaaataagtctgtttccttgtctgtaaacaaaatgaaaatcttcaaagtatctgccctgcccatctctgagttagaaagataaaaattaacacacatacgtttaaactgctttagaaacagcaagggagtgctttataaacgttatattttaaagagtttttctttgttaagtaatattacaccttggttctcaataaaatttggaatatttaaactgtggctactttatgtacatgttaaatatttgatttgaaggggaaaaagtaaaaattgcagaaaaacatatgttactttagggaagacctggagtgtttacttccttgtcactggtttaggtagatctctattgtttatgaatattgtgctaaagggccaactgagaaagccgttgcatttaagaccaggatttaaatttagtttgccccaatacagaaccagacaaagagcaaagatagttttcacgctctttctgcatcttaaacaatttagaagatcacaactactttttacttccttttttccctttaattaactgtaccaagatctctaaaacatattgcattctcttaccctcccacaacttaattggaaaaccagtgcaggattagtctaggttggtcatttttcatctggcctgcaccatcacattttcccagctgaactgggctcagcaatttgatattgctaagattacataagttttaattgttttgttttttagaatacaatataaactgaaagcacatttgaaaaagaattggaatgataagagtattagccattaattagaaatcttaaataaaaatcactgtttccaaggagaatggtcgatgaaattgttatagtcatgccatttctaaatattagatcaaaaatctcttcaacctccctttcagttttttaaattaaatatcacatgatttaaattttttaaattacacatcagattaggatttatttgaaaatcataagttgttatcactagtgatacttaaaattcaaaattacttatgttgcatctctaaaatattgaaatagctgacctttgcctaatgtaaccggcatctgacagaccagagctatagcagtgactgaggtcagatcacactgaatcatgaaaaaccaggttcagaacttagaacatcaacccatgagcaagtgctgagaagacacatgatggggtaagggaccaaaagggctagagccaatttgggataaagcagtaaccggaaatggaaatggaaagggcaacacttcaagtccagagccagcagaaaccaggcacattcattcaattcagcaacagctgtggagtgcttactatggactaggcaccaagaatgtgctgtggtccattcccactaataaaaaggcccacggatactagattccacaattgactttattctcagcagtgtgcttctattttttaaatcatctactgtgtcttgaaaattacctgtagagcagactcatcatattgggccttaggaattaactttgtctttttcagtaaagcaatacaaattgcacaaaagtcaaatagaagcaggaaagatttcccattttacaaagttgcccactactgaactcagttcactaggcagaaaattggagttttcagatacgggtagctagtttctttatcagactaagttgtaatttatagtagtgacccattgggatgagatgtgaacaaaaaagaaatgattttagtaggaaaaattaacctctattgagccgttaacacattctctgtaaaaccagaaaattattgcatttttaaagttacttgaaaatttgagcaaattacatttcccatcgtgaggtggcacatcgaaaagtaacatgaaagtatgtttctccatttatgcaggaaaccagagtaggctttctgttctgtctttatcataacttaccattacataagtactaattgtgcttttctctttatcctttttttaactatcaaagatgacctgacattacattttaaaaaggaatagtaataaaagtaatgctaataggcattaataaaaatcactgtttttataggagactggattaagaaatacttataaaatatcgttactaaatggttttagatataaagttcctttaagcaacttcccttttaaaattataaaattaggccaggcacggtggctcatgcctataatcccagcactttgggaggccaaggcggggcggatcacttgaggccaggagtttgagaccagcctggccaacatggtgaaaccctgtctctactaaaaatacaaaaaattagcctggcgtggtggtgagcacctgtaatcccagctactctggaggctgagaaatgagaattgcttgaacccgggagacagaggttgcggtgagccgagatcatgccgttgcactccagcctgggcaacaagagcgacgctccatttcaaaaaaataaaataaaataataaaattaaacatactcctaacatttctgattaggatttatttgaagatcctcagttgctaactggactacaagaagaatgtgatttcagatacttgtggatatgataccttcagtagtgaatttttttaaaatcctcaactctgtattaaatattttttacagttactgaaatttgtttaagttgaaaaattagcaaacattttcaccttgtaaacaattttttctttagtaattgtattatgatattctactatgcattataggtgatttggactttttgttgcttgaggaaaagcaattactgaagacaatattattatgcagaaaggtgtgtacctgaaatgcagtcattctacctgttgtagaccagtctttttaaaaatggaaatggcctcatatagtctcatggagagagccctctgttttgttgttgttgttgttgttgttgttgttatagcatctgaccagggaacaccattcgtttcttacacttaggcttctagaacatattgtgtgtacccactcattcttattggatggctaattaagaaatcagtgggaaattaatcccaggcactgatttattttattttacacaagtaaatcataagataagtattcttcccactgcttaagatttgattaaaatcttatagtaaaatagttctgtcatatgtaatgtagatcatacaaaattttcttcatacaaaatttccatcgaaaatgaaattctttctacatacaaaattttcatcgaagacagtatttccaggttcagtctaataaagcttaatgtttaaaggttttgcttgacacctgctttttttcattttaatagtaattgagactacaggatagtgtctcatttcctaggttcagtttagatgtactgggttgtcatcagaatcatagctttaggaggctatgttcaaattccagtgtcaccatttacagtagtcatcagttagcatttattaaatgctactgtaagtctcgcaccaaaatggacattctgtgattttattttctgtataatttctgtagaagttaagcaatattctaatttttgatgaggaaattagagaaattaagcagtttgtccatagttacacagtgaaggacagagctaggaattgcacgcaggtttttctgacttcaaagtgtttcttattttatttcatcatgtgacactcctggccctaggactttgggcaagatacccagcctctccctgattcttaactataaaattaagatctggtaatacttagcttatcaagatgcttcagtgattggagatgatgtgtgccaagtacctggcacattgtagacattaaataaatgatcgctgttcacagtgctcttattacttgtcagactggacatgtgccacataatatgcaaagctgttatttgatgaaatagtatataaaatgtcaggggaataataatttttatgtcagattccaacactacccggctcctccaagcactaaacataaaatgtgcatttgaaatcagtaaggggctgcttcgaatcctggtgagaaaaaaaaatcattgaaattggatgcagacatccacaggcagcttttccagtttctcagattgctctgttgtattatcatatagggtgatggatgacattaaaagctataacactattttgtagaagagattcactgcatgatattaggtatgggcagagatcaaaagtcctaaatgtaatttttgtaaaaggagtaatttaaattctaacttgcaacaattttaccaaaattctgaccatggatacttaaaaacttttaaaagaaagagaagataatgcaataattgattttaaaaaaatactaggctcttcctctcccttcaaggccaggtctttagtaaccagatttgttgacagcctgtagtagcctaagttaagaccctgcatgtgtgttcctgggatgaaattgcatagtgaaactcatctccctttccttatgcacagtcgtatttatgcatgtggtcatactagtaaacacttgcaggtaagtaatttaggcaagatctcacagctataaatgacaaaacttacactcaagcctgaatctgacttcagagccattgctggtatcctgacaaagtagctacaatttcgagtgtagcatattggagaaaagtggaggggagggagtgccttcggttaacaattttaaattgaagtttatttacattgtctaaaaacatatttttaaactttcagcagtttttcctagaaatacctgggatggacacccttctcaccccaaaacctatgtagctatccggccctcaagaagccaatatgtacactaagataaagggcgcactgtttactgaggatggctttcgtgttactggcgttttaaacaaaagaagtcagtaaatgtctcaggataggatcataggcaccatctgttgaagtggtagttttgtcaggagttaactgccagctccacctgtacgtggacgtcactgctggtacatattagccagaatttactgtgatataaactcattctcttacttaaaccattgtctgcctctcaagccaacctgtcttggtaactttgtacatagtaccacttgcaaatgacctaaccacaggaagcttttcagatgcagaaattatggcagcaatcatacagcagttttcttaatgaaatggtaccaaagccatacttggcatgatgttgaaatccacagctgatttgcttttcatgggtgccaaatgctctatactatggtaagaaatcatagcggctgcacgtttttaatctatgaatgtgtcattgtatattttctttgacagcagggtagcagggaactactcatgagctctgttctgagctgttaagtgtaccccatttaaagaaaacccactatgtggaaattgtatttgttaaaatgaaaattaactaaatgagtctccaagtggcatataatattccttagtatataaggaagtgtcatggagccctttgaaatccagtgaagcaagtctggtctcaaatggaactcgaaagcatattaggtggatattggaaagccttttaaaaagtaatcattgaggcagtcaaataaagtaaaattaacttcagtctgagttgtaataaagagcatattagtggtctttgtggagatcctgtttatcatgtgaccctctttcccaaagttaaagaaatgtctttagggctgagccacagtggttcatacctgtaatccccgtgctttgggaggccaacaggagaggattgcctgaggccaggaattcaagactagcttgggtaacacagcaagactccatctctataaaaaacaaaaattagccaggcatggtagcacacacccataatcctagctactcaggaagctgaggcaggaggatttcttgagccaagaggttcaaggctgcagtgacctatgatcataccactgtactccagcctgggtgacagagtgagactttgtctctaaaaattaaaaaaaaaaaaaaaaacctgaaaagtatgaagaaatcctgccacctaaaatagtaaccgtcctgtaaccaattaacgttcctacctttattagaatcattttaatagtatttttgtgtgttaagttagtctcattgagtacacataaaacttttgatttgacaaaatgtcttggaaaatcaaatgtttgaagcttaatgtgatagcagttcactcactgatatacctcagcttcttatatatgcaaactgtttctctttgtaatagattttaaatttcttatcctaaagagaagttgatttgatgatacatttgcattggttaaacagtttttagtaagtagtctttcccctgcttctgtgagaaaatattttctgtaaaattttagagaaaaagaatgaggaagaaagagaaaatgtctatcctttaagcatagcagggaattatatgacagctaattatgttgtgatgttgctttacttgtccagtaaattcagggcccacaggaatcaagaaatctgtatgctgtggacccctctcacatgtggctcacagtttagtggaaagagagtgctgctcagaagatgctttatatgtatgcatattcctacatttattgcatttaataggattctagattaagattctgagtcaaattattttaagaaatgttgccagattgctttccaaagatggaaataattcacatttcttccagtagtttgaggacccttcctccatccccaccagcaacagatgccgccatctccttactttgtgcctgtttgataagtgtatatcattgtagcagttttcaatggtgataaaatacacattagatttatcatcttaattattttcaagtgtacagttcagcagcattaagacattcacattgttatgcaaccatatcaccaccatccatctccagaacttttttcatcttgcaaaaactgaaaatctgtacctattaaacacttaaatcctaattcctcttccccccagcccctgtcatgcaccattctactttctgtctctgtgaatttgacttctctaggtacctaatgtaagtgaaattatacaacatttgtccttttttgactggcttatttagcttagcataatgttcttaataaaatatttttatgatgaaaaataactccctacaatatgatttgctgtagtagttaatgatgaaactctgtattttcatagcatccatttattcacataatcatgaaatatttgttgaatatctcctgggtgtcagatgctgtcattggcactgggggcagaggctaccactgccctcacagagaataagttctagtgaggaagacagacaatttgcaaataagcaaacaggtaaaatagaatgggtgggggaaggaaaagatgatccgatggcgcaggtaaagtgcaagggaatggttatgttagtcagtgtggtctggagaggcccagttggaaaaggagcttgagacttggaatatgagacacacgagagcttaaagtgtgccctggcacggtgcaaaggccctggggcaggaaggaggctagaatgccaaagaaaaaggcaatggctaatgtggtatggaagggagataaaataagtgtgccattagagttggggcagagacttaagttttactagatcatgtagggcctcaaagccaattatagggagattagattttatttttccccttttttttttttttttttttttttttttgagacagagttttgctctgtcttccaggctggagtgcaatggcataatctttgctcactgcaacctctgcctcctgggttccagtgattctcctgcctcagcctcctgagttgctgggactacaggtgtgcgccaccatgcctagctaatttttgtatttttagtagagacggggtttcaccatgttggccaggctggtctcgaactcctgacctcaggtgatcctcccacgtctgcctcccaaagcgttgggattacaggcgtgagccaccgcgcccagctggattttatttttttctaaaggcgttgggaagcaagccatggaatgattttcatcctttatagttccagagaagtatggcacctcatcctaacaggaaatccaggaggcagtgagaaagattacaaaggcccgtggccaggcacagcacttagcagctctgcattttccaccatttcccaggtgaggtaactaaggctgaagacttgcttcctgcaatctcacagcagcaaggacgggcagatgtgttcctttgttcccagacctttagtctggaataataggagtggatggaaaaagtgtttttggaaagcagacctcaacagattttacatcaggaatagttctgttcctataatggggagctataggtttaagatacaagtccatcacttctgccacctgacctcacccttgaccccgcccctgtcgctgtatatttcatactctgccctgggcattctggcatgagcctgttgaaactagcatctcctagcaatgagagcctccccttaatctaggctggctgcttttgctacaagaaaaatgtctatgtattctgatggccttatgatataaggcgggtggaatgtctggttaaaatacttgaaacatgcactgtccaatgtggtagacactggccacatgtgacttttgaacacttgaaatatggctaatctacattgagatgttctgtaagtgtaaaacgcacattggggtttaaagacttgtatgaaaaatcaatatatataaaatatatatatttatatataaatatatatataatttataaatatataaaatatctgataatctgataatttttatactgattacatttttaataacattaaatttaattacagattaaattgctaatattttggctaggttgggttaaataaaaatatactactaaagttaatttcacctacttatttttactttttaatgtggctgtgccaggaaatttatgatttgcttctgtgctcttctgttatttgcccctctggccccccacacacgcacacacatgacctcctgctgtgcttcctcactgcacagccatgtgtgcactaactaaaccccatcatcgtgaaagaggaggggagaaaaccagaccccatcatgatgtgttctctgaagcttccaaagtttgaccaccgaggaaaaccacttgaaaatgtgtccacaaaaacttcgaaaaggttccattctcccagacagcagggagtctttcctcacacctcatttttcacatggtgttttcttcatcttcccatataccaaaaaactgacaaaatgttttcataaactgtggacctcataccgcttcttacagccagatataatgagcttattagcaagttttaagaactgtgccttctggtggcctggtggcttccaggcacttcctggcaactcgccagttgcctgtcctctgcatctttgtagttgtggttctcttcacattttagaaacttggagtatgcagaagcctccaatggtccctatttaattctggcattactgtcagatagccttcaaccagaggcagaggggcagatactcttcaagagtgtgggtaggtgagagagccagaagcagcaggcaaaggaaaggtagccccagtgctgaactgaagactccatgccttgcataggcctgcagaaacccagggttaccaactgtgctgagcaaactcattttacagactgggaccctggccttaagagaaaggcccatggcatttaataatgttgctgatacatcacttagaatcactgtgcagtgaggatgatgctaggggacaggtatcagggagacaaatgagcccacccagcattcacacatttacttggcttcacttttcaagcttcctcagaatacttcagcatcatatacgaactttggaatctgcctgtccctctctagtttcatcacttttcactcatgcctctacgtctattcttcagctgtacttggtttatgaaagtaccagcctctcccatctgtctgttgggctgcttgccccacctccggcccttggactcagagttccctgtgtttgattactcttctttccatcttcactttagctaattcttcctacaacttcagtactcagtttagaggtggccgaagcttccttgactcctgtgtgtcctgtggcacctgaatttgccctatcttaggttttaacatgatttattaaaattcctatttattttttcctaccagacccctgaaagcagagagggactctatcttgtttaggctttagtctctacaaataacatagtacctagtgtactgtaggtgaatgaataagtgaatgagctgtaaacccagatacagagtctcctcaaagtcataggtagatgctggacagttgttaaatgtctgtctttatcaaatcttagggattataatattttaaaactcaacagtgagagaaaacatggaaacttcttatcttttgaattgggtctctgtggtgcactgtaattcaacatttaatgatagtcttttgatgccatttatatttattacgatttttaaattgttcttgtacttttgatagcttacttcaggtccatttctgtgttggtttctctgacctctcgtttgtctggcaaaatgacttttttttgttgttgttgccagcatgactaataatgatttgctcaaatttctcccattcttacagatgatattaagaaactgaagttatttttgtcttacaggatcaaaccaatggtgaaatatagctcagggaaacattgttttggctttgggaaacaaataccatagataaatttgagtgtcatttccatctgtaattgcatgtgattgcagtctttcctgctgagggcttcttaagcgaggatgcctgaaaatagatacttttgcaaatagagttgctaattttaaataaaaatataaaatagtagtaatagtagtgatgagttaggaaaaaagaagcatatttgatggcgtcctcagatggtttgctttaaatattagttgaaaagctatattgaggtttctcatttgggttcatcagaatgtttctaaatttctccttgtgatatcttatataaatggaataaactgtcagaaccagtatttaagttggtgtcatcttgatatcaaagtatttaaatgaatgatgttaatagttttggaagttcattcagaaatggttttagcatatatatttctcgtttctgagaaggaaattctatcactactattcacctattataaaccattttagcttcataccatgtattttattcagtaatttaattttcaatgtaaatcattttggcttccaaaaaaaaaaaaaaacccattttgtttttgggcagtgctccaacttctacaattattgaagcgctgcagaatgtaaattcatttagttggactaataagttcataaaattgtgccatatttcatcataatctctttactaaagtggaaaatccctctggtttataaatttcagtggtttttaagtttttagtttgattttggttttaacgttcacagacgtaagtactgctgagaattttaattatgacatttttagtgcgaagagaccttaaagaaaattgaagtgttatttaaattctaggactagctaaatgatatcaatagttttggggagcacctccaggtggactctttctattttggatttctaatttaagttactcagtaatcaaagagtctcaaaattgttgatattttatagtgataaaggttcttggcactgtctcttaaaaagttaaattgtccagttgcaaatgatggtatgtcttccctagaatttgattttttcccccaaatttcacagtttggtgattgtcataattctcatttgatgaattgtaatctgttttgctaaattcagtattcattaaagttcatagttcagtgagatataaatgtaaagataagaatgtttgtggtacaaaggtaaaatattatcccagttcaagggacaaaattataaaagagaatcctttggcttctttcccttactagtggctaatgctttccaaaagtaggagcttgggaagaacaattgaagaattgatgatagccccttaagaactgggaatgtacttcaatcccattaatcttaagtgtttttgcatcgatgtgtttataactagagttaccctgtgtcccagttagcctgggaaagttttggtgtacacctgtgtcctggcgtaatttttaatatcacctcctttcacacactgtaaagtgtttggataatgattctatgtatgatgcacattctattgtgataccttatcagtgatgaccatgagtgtccagctagatacaatttcccaaagtatttgatttaagtgcataaaacattgaaatatgagcattattagtgattgtaaattctcaaatattttatttatggtatgctaaaccttcaaacaaaacttttctgacctttttttaagtgtaagagtatcagttgctaattgtatattttatttattatatattaatactattatgtattagtgttatgcatccaaagtgaattattctaaagttatcttttcacccatatgaaaagcatataggatttcactaaaaaatcaacttttctttttccattgaggctgaagatttgaaaatgaaagcacaaatgctgatttctagagctgacactgaagtaaacacagaacaattcctatagaaacataccagaagccattgttaggtgggggatcacttaccccgacaccttgaagcctgggtagaaatgacagtggagcagccaaaaatcagtttagctaagagtgcagtggtattcagccctgctttagggattcaggttttttcccacttcctcagaaatgggaaagatgagttataattctgccattcccaaggggacgtcagatgggtagtgggatccctccctggagctgcactggcctagctttagaaacacagaagagtcaattcagatcttgcatctgcccgctgctgctggcagtggccgtctgccaagggagaagatatatggaaaagaggaaaaaatgttggcaaggaagaaatatatcagtaaagatggaggaagaaaggtagctttagtcacaaagtctagttgctgataaatttttttgttttagaattattttggtatttcaagaagagaaaaatagacatggttctaaaacagctaagctgttgtcctaaccattgttgaagtagatccttgtttcacaacaacaacaaaacactcttctcctaacactaaaaaaaattctcctggtttaaaattaaattattgtttctatgattgtacaaccataaaacttactaaaaatcaatagactgtacacctatagtaggtgaactgtgtagatgtaaattatagcccaataaagcagttaaaagtgaaaaaaatacaatcacatttcagaatggttgtgttatattttaaactttaagaaaagtccaccgaacaattctgcttttaattcttatttttatgaaaagcttttaaaacttaatacgcagacttttacaaacacacaaaagaagataaaatagtataatgaaccctcaaatatccataacctcacttctacagttagcggcatatccccttttcctgcctcactggattattttaagacatgtcctactcaatgataaattcttccatatgtatctgtaagagataggaatcttaaatatatatatatatatatataattgccacttaaattttttaaatactattattaaaagaataatcctcaaaaatttccttagtatcatctcatgaagatctttttacagttgtttttataagtgtttacaatgcactttttacaaatcaagaaccaaggaagcaccacacattttaatgtcctaaatagtttctaatgaggaccctcctgtaaccaggagttgtcattttaaatgcgatttattgaccattccaaagctcttttgaatattttcatgacataataaaacagcaggtatagtttagtgcaaaacattgtgaaaatattttcatgtttagcagttgtttctagtttaagttttaaacgcatcacccaaaataatctgtacaccaaacccccatgacatgaatttacctgtatagcaaacctgcatatgtacccctgaacctgaaataaaagttaaaaaataagaaaatagagggagaaaacccaagttaatctctgttccgcaatccattcattctccctagtaacccatgtattggccttcagcagaattacctatattccccatccctccctccttttttttttttttttttagttggagtctcactgtgtcgcccaggttggagtacagtggcgcaatcttggctcactgcaacctctgcttcctgggttcaagcaattctcctgcctcagcctcccaagtagctaggactacaggcgcatgccaccatacctggctaattttttgtattttttagtacaaaaaatacaaatacggggtttcaccgtgttagccaggatggtctcaatctcctgacctcgtgatctgcccacctcagccttccaaagtgctgggattacaggcttgagccactgcccccagcctctccctcccctttttaaataaggttatataagtactggagacccattgaaatgttgggcaatcactctgtgattctgcctgatgcgcactgataaattttgatggcatttctcctcaaaataaaaaaattgtttaacttgtcaccttcctaacacctagcatagagaaactgaacatattgttacagtgtattcagtagacagaaagctttatgttaggatgcttagcatgacagaaaccaaacttgcacattgaaattacttttgggagattgcttgtggatgatggtcaccccatcattattcagtatatgggccacttatttcaatgatctttagatataggcatacctcagtttattatactttgtttattgtgccttgcagttattgcatttgttaatttcagattgaaggtttgtgacaaccctgcattgagcaagtgtagtagtgccattttcccaacagcatgtgctcacttcatgtctctgtgtcacattttagtgattctagcaatattttaaactttttcattattattattattatatctgttatagtgatcagtgatctttgatgttgctattgtaattgctttggggtgccacaaaccatgaccacgtaagacggtgagcataaattacaaatgttgtatgtgttctgactgcttcaccaaccagccattccctccatctctcttcctctcctcagacgttgctgttccctgagacacaacatattgaaattagcccaattgagttgagctctttgggaggctgaggtgggaggattgcttgagtccaggagtttgagaccagcctggacaacatggtgaaacctcatctctacaaaacatacaaaattatccaggcgtggtggcatgtacctgtggtcccagctactcaggaagctgaagtgtgaggatcatttaaaccaagggaagttgaggctgcagtgaactgtggttgtgtcactgcactccagtctgggcaacagagtgagaccctgcttcaaaaaaaaaaacctaaagaaattattcctattaataatccaacaatggcctctaagtgttcaagtgaaaagaagagttgcacatctgtcaaaagctagaaaggattaaacttagtgaggaagacatattgaaagctgagataggctgaaagataggcctcttgcaccagttggccaagttgtacatgagaaggaaaagttcttcagggaaattaaaagtgctattcagtgaacacacaaatgataagaaagaaaaccatgtggctggtttaatttgtatgttcacagattcgcacttttaaggctggtatcagtcttaatgctgatatggagaaagttttagtggtctggatagaagatcaaaccagccacaacattctcttaagccaaagctaatccaaagcaaggccctaactctgttcaattctgtgaaggctaaaagaggtcaggaagcagcggaagaaatgtttgaagcttgcagaggttggttcatgaaatttaagaaaagaatctgtctccaagtgcaaggcgaagcagcacttcacgttgatggaagtgctgatggagaagctgtagcaagttatccagaagattgagctaagataattgatgaaggtggctacactaaacaatagatgttcaatgtagatgaaatagctttctattggaagatagatgccacctatgactttgatagttagaagaagacagtgcctagattcaaagcttcaaaggacaggctgactctcttgtcaggggctaatgtagctggtgactttatgttaaagccaggattccaaaaatcttagggcccttacgaattgtgctaaatctactctgcctgtactctatacatgatgcaataaagctagatgacagcacatttgtgcacagcatggtatactgaatattttaagtccactgttaagacccactgctcagacaaaaagatatttttcaaaatattattgcatgctgacaacgcacctagtcaccaaagaactctaatgcagatgtacagggaaattaatgttgttttcatgcctgctaacacacatccattctgcagtccatggatccaggaggaattttgactttcatgtcttattatttaagaaatacattttataaggcaatcactgccgtgcatagtgattcctctgatggatctggcaaagtaaattgaaaagtttctgtaaagaattcaccattctataatatgatacaatccaaaacataaacgattcatgggaggtcaaaatatcaacattaacaggagtttggaagaagttaattccaactttccatccatcatggatgactttgaggggtcaaaacttcactggagaaagtaactgcagatgtggtagaaatagcaagagaactagaaatagaagtggaccgtgaagatgtgactgaattgctgcaatctcaggataaaaattgaattaatgaggaaatgctttttatggatgaggaaagaaagtggtttcttgaaatggaatcttctcctggagaagatgctttgaacattgttgaaatgacaacagaggatttagaatattacgtaaacttagttgacacagcagtggtagagattgagaggattgcctacagttttgaaggaagttctgtattacatgctacagagaaccctttcatgaaaggaaaagtaaatctttgcagcaaacttcattgttgtcttattttaagaaattgccacagttgccccaagccttcagcaaccaccactctgatcagtcagcagccatcaacatcgaggcaagactctacctgctaaaagattattactcactgaaggctgatgatcattagcagttttagaaataaggtatttttaattaaggtgtgtagattttttttgatgcagtactgctgcagagtttatagacttcagtaatagtgtaaacataatatgcactgggaaaccaaaaaaactatgtgcttgctttattgggatgtttgctttattgtggtgatctggaacagagctctcaatatctctaaggcatgtctgtttgttattggatcttcacaatgaatatattagaatttatcaatggttatagcaaaaaggccgaattgaaagttttggttcgttgtgaaatatcatcattagtttttaatctggacctagaatctaggtccttacatgcattagagaattttatccctctaagaaaatgatacttttagtcatcagtttagagcactgcacttttaacagaatactgtttgaaatgattaatctgtcatagagattggaatactcaccaaggggtgaaaattaccttgacaagtaggacctaagcatcctttagatggtactaagaataaaaagcagtcttctctgttaggccatgtgaccaccacacacatcttagaattcattttgagtttgtattacaagagcttgttttcagtaatcgatacttaaatttggagaatttgctgagcatctttcttgttctttagctgttgttaacctataatgtgatactaggaaatcacatggtctgttggatttagaactaagactttaaaacataaatacattctcctgttttgtgtgtgaaacttgaacttccgcttactcttatttcatcccactgcatggttataactgagcatgaaagcttaaatgaaacagaggaagaatttagagctaaggtaaaggcattggatgttaagtaggatattctattatttagggtgctttgcctataatttttcaaaaatcctatacaaattgacttcaataatacaaaatattactggctcacataattgcaatttcagagggaaggcagctatcaggattggctaatacaagagaagagcaatgtcaagatcttggttcttgccacgtgtggtggctcacgcctgtaatcccagcacttagggaggctgaggtgggcagacgacttgaggccaggagttcaagcccagcttggccaacatgctgaagccctgtctctactaaaaaatacaaaaaaattagccaggtgtgatggcacacacctgtaatcccagctgcttgggtggctaaggcatgagaatcccttgagcctgggaggcggaggttgcagtgagccaagatcacaccactgcactccagcctgggcaacagagcaagacgctgtctctaaaacaaaaaacaaacaaacaaaaagtgcgttctttttatctctctgttctcccctgtaagtgcctgttttactccaaagctaatttctagtactagagcttatgtggcttctcagttatgtactggaagagagagagaattgtcccaattaaagaaggacagctttcccacccccacagaaggtctcaggaaacctttgacctcagagttctatggtcacttgtgaacagttggtatcaccttagataacaaagcatttccctggagttgagattggagttagcaccctggacataagtaagctgtaggggaagggttggaaaggggacagacctagagttctttagggaagggggaaaggagatgagtgatacataggctacaataatgtccactacaatgtccctttaactttaagctgcttataaaaaacgtaaactatcttctgactatttaaattggtatctttggccagaggtgacatttggtgactttcatttgggtgtatttttgctttactttagcagatcttagaactgggagacctggctatcacaggagtatctgtggcctgtggtaacatgtatctatgggctgagaatgtcagtactctctaactgtatctcatctccttctgccaagaaacccagagcccacatatcatttgtttatttagaattaagatccagtaccctttccagttccaaaattggcatacacacaggactataaccttattttgatgcagaatattttgctgcttagttcagctaaaatccaggttctgatctcatgaccaggaaaaaatagacatgaggaaatattgaagggtgaggagggcagatttattaggtaaaaagaaagttctcagcgaagaaagagggggttctgccaacaggctcccacctcactgtttgaataccaggccatcacacacaagctgaagaggccaggcttctcccagtgcctaaggcgtgaatttcgggtggttccactttattgtccaagcttgcatgtgggcccccagttcattgcgggcatgcctgggtgagatcctgtgcaggttcccttatctgcctcctgcatctatcaatttgctttaatctcctttcagcaaaaggctgtggagatggtttcttggcctagaccttgtgtctttgctcagttgccttcttcatgggacctgggcaagaatctttctactactagtcatcagctctttcaccataattgttcatcccttctatgcctctcagctcttttataggcatcatacaggagtttgcctttctttcctgcggatagtttgcctttctttcctgccggcagtctggctgtggtggaaggatattttatgtttttctgaacacctttattatatggggttggatataatgtttcataaacagtagtctcctgctttgcatatccagccactttaaacaatagatactcaaatttcagtagttcttttgacttttaaatgttgtcttctgctttactatgttttcaaaatttggatgcatgaatcagttggacttcattaaaatttaaaactccacttaccaaaagataccattaagaaaatgcaaagggaagtcataggctgaagaaaatatttgcagcatgtatctgacagaggacctgtttccataatatgtaatggagatatttatatatatagcttaaaagaagaaagactacccaatgaaaagctggcaaaaaaatcattgcagctttgcttttttattgcaaaatattaggaacctaagtgcccaaacctaggataatgcttaaataaaccatagtacatccacacaatggagtactgtgcagctttataaaagaataagaaaggtttctctgagttgatatggacgatgtactgtcactggaaaaagcaaagtacttgggtgtgtgtgtgtgtgtataaataatgcaactattcatgtgagaaaaaagaaaatatataatacacgtatatctgcatatttgtgcaaagaaatacagggaagatcagccaggagctaatgggattgattgcaaattaggaatgaaccctgtaatgttggattgcaataggagattgcactatgatctcctggcttttaatatgcatacatacctatgtgtgtctctttatgtgaacatatctacatttccttgttctgtctactgagaaggcccagatacagtgacacccagtaacaagaagcatagctagcacccagatcttgacttcttaataccattcaccaccaaaaagagtcaggatctttaagcagtggctggatttaggactaggggcagagaaaatacaaatgatcttggagcagcaatatactggggctccagaaagtaaggaggtctcaaaaaaggatggaggtatttcaaaaggacacaagaactcatctgaagaaactcctggtgggtaaatctgggataccttgaacaacaaaataaataaatgagggtgaatagattataatccatagcatgcattaaatatccataatttcatacacaataaatctatcaatggtgaaaaagggacagcttacagtgcaatgccatcaataaatatagaagaaatgaggaaaatagaaaaacactacttggccatcaccatggtaataattgttacaaataagaatgataaatggatgctaaattagtaggtgaaaatataagaagcagaatatttgcctagtcttgaaatatccccccaaaagatacttattaagaacagaggaaaaaataacactatagtagggaaacctggcgggcaccttagccaagtaatcaaagttagtatcaccagtaatgagaaatgtcaatatcatgtaccacctggaattgtgcactgagaagggtagaacgtcactcttgttaaattcttgccaaaaatgcctaagttgaatttaagcaagaggtgatatcagacaattcaaactcaaaaacattctacggaatgacgggccagtatttttcaaaagtgtcaaggtcatgaaaacaaaaactgagagactgtcggttggagaccaaggatcctggattggaccctgaaccacgaaaaggacataggtggacaaccgatgaaatataagaaaagtggatttgttaagagtattgaattataattcagtgatcattatgctgtgattaagatatttatgtaagatttataatgttatataacatttggagaagctgagtgaaggttatacaggaactttatgtacttttcttaaacttttttgttagtctgaaattatttgaaaatcaaaaattaaaaatactacccaaagacttaaagacaggcttaaccaatgatgctggccaataagcacattttaaaaatgctcaacatcatttgtagtcagagaaatacaaatggcaaattaaaacctgaattaaatgctattttatacctccagaaatcaatgataaagatagaaaacaccaaatattggaaaggatgtgaattagctggaactcgcatgcttcactggtgggaagcataaaatggcacaaccacattagcaaatagcttgtcagtttcctataaagtcactgtatatataccctaggcctacctagtacatacctattgctatgacccaggaattccactcccaggtatttatccaggaacatgaatacacatgtccacacaaatatgtgcacatgaatgttcatagcatctttattcataatgtgggtaaactatgtatatgcatataatggaatactattcagcaatgaaaagaatgaactactgatgcatacaacccagatcttaaaaactttcagggaaaaaagacacaaagaagtgcttactgtatggttcatttacatcaagttcaagaaaaggcaaaaaccaaactatgtgactgaaattagaatagtagtttcctagtggtgggcggggattggctggagagagcacagggtagctttcttggctcagggaaacatttatccagacttactatattgtacgatacattttacctcagttaaacaaaaggcccagagtggagcataatgtctggttttgattaagatcttactgaaattttgaggtgttaacattcatgtgtacaaagctttcagcaactttttttgtgataggtgccttaaggaaattgtactgtgttattattttctgattacacatatcttaggaaagcataaaggcttatattttatttaaatgttattaatatattatgcattacagatatctgaaaatgtctactcttagttaagtaaacttctgtgtaaagataggacatttatgagtaagtccttgttgaaagaggaaaaatgacccagtgagtgatacagtcgagtgccagatgtttgagtaagagtgtgaaaacattaggattataatctccaagatgaatctgctgttaagtaccttgccttgatttcatttccttaggaatgtggtttttgttaataaaaaatgtttttcttgtgtttttatagtgacatttttctgcaacttagtaactccattactagtacagaagagatattgagatttttcttttcaaaaaagctctaattatttcaaaattattcaaattttaatatccataaattatctgtaattcattaggagatgatgggaataaatattttctaaatgaatatttgtgtcagtttcaggaaagaaaaaattaaactcctacagaattcataacattgttatgtataaacttgaaaacaaagttctaaagatgagggaatttatgtttttatatgtgtcttttgaggcatgattttatgttgtttcataatgaattatattagcaaacattaactcatattttctgataggtaggaggtagataaacttttctaaaaactcatacaattttataaaccactctttcacctgtcattcagcagaaagcgccgtcaaattcccaaacctcaatatgtttcctatagtccagccagaaccatacagatttggtaacaggattctctagcttcttgagtaagctagggttgagagtcagagagactgcattctagttaagccaggaggcctacaggagaaagagaggaataataaatggttcatctgcagtattttcatgtcttctagtttgtccagggaagatttaaagttccagttcttacatggcatcctcgctgaagttataattccttaatgcttacttcctaataataagctgctctttgttcatcagttttgccttgctgcagcagaaagaggaaataacttgaataaaatggaaataagattttgaaatcccaactccaggagttttttctggatgtagctttcctgaaataagaaggaaaataaacatttgttaatttccttcatccagtcaggccttatcagatgtaatgtttcttctactccttataacaatcctgtaagttagatattgttatcagtattaccatttaaaaaatgaagacattcaagttgttgctttcagaagcttcacagttttctaagacatggcagagctgggattctaacccgtattgttccacttcaaagcccaaacattttcccacacaccacactatttcttgaaggttagagtctgctgaaattcataaacagtgaacaaatgtaaaatgatctccagctatggaatactaatactggctttgccatagacttgagagagcttcgtttttctgtgtccccacaatgtaatgctgcctcactcgttctaactggagagaaacattctgcacacttatgtgacaaacatttatttagtgcttgctttgagctttactgtgtgtagcgctgaggaaatgaaatagacaaaatcattgtgctttgaatgtcatatcatgaaatagtgtaacacattctattttgactaatgtgtgtatgtatatagatattcttttataaaatctttaaaattcaatttttctcttagtcataaaattcttgactctctagctcatttatttactgcaagataacctgcttcttcctgagattagggatttgcatgttgtctatgctagtttggtctttttcctctgtttttttttttctttttctttgcacattctttctctgatccctattcttcccacctaacttgagattcttgactctctggtcttttccctttttcacttaatccctttagtacattgagtcaacatatgtttgtgaatgtctcccaaatcaacatcgtcaacaccttgttctctctagcttcagtttttaggttctatatgttcatttgcctataggatcttcccatgcctatattttacaggtacctaaaacataacaagatgaaaatttaacttctaagccttcctgcaaacttggcagttcttcccaactttcacatcactgttaatgataacatcacgattatttcaggcactaacatttataaccttaaagtaatttgtgattcatctctcacctttgttctttatgaaaaatcagcctctgagtcttattaatgcttcattcaaaatatctctgctctacctctttctttcttccaattcaggttgtttcttctctttcacttgacagactcttctgtatccctaaactaaccatactactactcagttggtattttaccaatacttctttctttatgtcttcctttaataaaagcttatcatagctcagtaacaccctgactttgctcttaagtcagcttccaccttaatcaactaccagatatttattgacagtctgccaggcaccgtgggaaagacacagatttgtataatacacagtctgtgtgctcagccagtttatggtctagttggagaattaaaaaatctgtatgaaaacaacactaacaatacatggtagtgcttagggagggtcaaacgagtggttccttatgtgtcttaattaagctgagtcttggctgtaagcggagaagtagggatgcatttgaggctggggagaaagaatgcattgagatttgaaggggacgtgaggaatattcggagcttgctgcatagctctgtattgctgaaggggagtgtcagtgtagggccgagtaggtggtaaggttggaaagtggagctggaaccggagtcctttttattcatctattcaatttgtgtcgcttttaaaatattatttctaagaattatagtttacattgtttccatttgctccattgcccatattatctttaccacatttttgttttgttttggttttttaccactaatatcttgctgtttctcctctccctctttctcatatatgcatttatgtatataggtcttactatatctaatctacttcatgcggctcccaagagcatgatgttatctgaaatggctgtgtaatcctgtagtatctaaaaagctggtaggcacacagtacatgatcaataaacacttgtttaattgaatttcagtaaaataaatagcaaacttttaccttctctgctccttctctgaaatgtaaacatttcaaatggcaaggtgtaaacttacctgaattaaatgaggtgtctctatccaacagaatatataacccgcattttaaattgtattgcttttattatgttttgttaatttcctaaatgattttccagcaattcagttgttaataataaatcagtgtatacattactaggtgtattgcttctctttcaattatcatcttttgaaaatttcaggaattatattgccatttttaccagagagcagagttgttgttgaagaaagtacaaatttttcatcttctttttcagtagctttggataaccaaggtgaatttttttcaggcaatcattattggctaatgcgggctttgaactcatttattaaatcaataggcttttgagtacttagcacagggccccctcctaagtaagaagtctgttggggattttaatttttcatgctgtgcttcattccgcataattgcaaataatagaaaatgtgtcattttggatgatattttatgattcttcataagatatatttgaattccaatgaggcttcatttaatttcaaggcaatacaatgttggtgttccatagattaaataaatgaaaatccaatttagtatcagtgaatttgctttggtgtcaataacagtcatagtaataattaacacttaattattgcttattatgtaccagatatggtacaagatctttacatattatattaactattttactatatacacacatacatacacagacatgtatgcacaaatttataagttaggttactataattattacatattagagattgagattgtagcactttttctttttttttttttttttttaagacagagtcttgctctgtcacccaggctggagtgcaatggtgagatcttggctcactgcaacctccacctcttaggttcaaccaattctcctgcttcagcctcccaagtagctgagattacaggcacctgccaccacgcccagctaattttttgtatttctagtagagatgggctttcaccatgttggccaggctggtctcaaattcctggcctcaagtgatccacctgcctcggcctcccaaagtactgggattacaggcgtgagccaccgcacctggcctgtagcacttattctaaactgacttcccagtagaataaagatatgttttacctttaagtcttatagttagtagaggttttattcatttctagtcttgataaatagaaaagaagataaacgtacatcaattttttgaagaggtttattcaatctagtgcttcgttttttaccaccagttttcatttgtaatatttcatgacattattatgataattaaagagtccttttctctctgacagtgaagtacagtgaatgagaaagaattgttctatgagttgtacgtccactttatgtgactttataaagctactactctggaaatcctgagatttaacagatatattcataaataaattattgataggttcacatagtaataaaggcttacagtttaccttttaaacgcttcagccactgtattctgacaaaaatgtcccaggagatagatgagcaagctgacactgagggagatataaggaaacataatcgcagaggcggtctgtttgagccccatataatgtacagagtttaacagattttcaacaataatctcatcagaaatttggtctcacccccagatattcttggtacatgtttcagttgctagcttcttcattttactcctcttagcatgtgatggcaagggcctcaaagccttcagaaatgttggttgagtctgaattaaggaagcagatgttaaaaaccttgtgtgttgcacctctccttggattctacaatgaagctttcatttgatttttagagattggttgattgactttggcatatggaaatgttttctctttttttcttttttagagatagggtctcactctgtcacccaggctggagtgcagtggcacaatcatggcttactgcagccttgacctcctgggctcaagccatcctcccccctcagtttcccaagtgcctgagactacagatgcacatcacctggctaatttttaattgtagagacagcgtctcgctatgttgcccaggcatgtctcaaactcctgtgctcaggtgatcctcccaccttggcgtctcaaagcgctgggattacaggcacgagccaccatgcctggccaggaaatgttttctgatggtttctataatcagaagtcagtccactatttccttaacttatggtttctctccctctgttgttcttaagccttttagttacaggatttcttcatgcttttaaaaattattgaagatctggctggatgcagtggctcacacctgtaatcccagtactttggaaggctgaggtggcaggatcacttgaggccaggagttcaagaccagactgggcaacatagtgagaccccgtctctacaaaaaaattaaaacattatctgggtttggtggtgcgtgcctgtggtctcagttacttgggaggctgaggtgggaggatcacgtgaacccagtagtttgagactgcagtgagcaatgattgcaccactgcactccagcctgggggacacagtgagacccggtcttaaaagaaaaaaaaaattagctgggtgtagtggtgtatacctgtggtcctaactacttaggaggctgaggtgtgagagctgcttgagcctgggaagttgaggctgcagtgagctatgtttgcagcactgcactccagtttgggtgacagagtgagactctgtctcaaacaaagaaaaaattattgaaaatcccaaagagcttttatttatgtaagttatagctattgacattttttgtgctagaaattaaaagacattttaaaaatgtatgttaattcctttaaaaataacaataaaactcatcgcatattaacgtatattttctgaaataaaatttttaaaataatgagaaaatgccgttgttttatatctttgcaaacctttccaacatctggttaatagaagacatctggattcttctgttgttttgaagtatatgaagaaaattggcctcacacagacatgtagctgcaaaagagaggagtattttaagagccttttcagataattgtgaacacttcttgtagccactagaaaactctattgtatactcataaaagcatgagaatgaaaagggcaattaatgtctaagtataattatgaaaatacttttgacttcttgaacccccataacagtccctgagaccctgggccacaatttgagaacccttgttctagctcacaaatgaaagatcatttaattttagagttccaggcaaagttaaagacattaattaggaacttgtattcaaaatatataaattacccctagaactccataataagatgacaactcttttagataaaagatttgagtagacgtgcataatctacatgtcacaaaggagatacataaatggctaataatcacatgaaaagatattcaatgtctttagtcattaaggaattacaaaataaaaccataatgagatgtaatttcacatacactaagaggctacaataacaatactttttaaacaacagtactaagttttggtgaggttatggaaaaacacgtcatatattgctggtggaaatgtaaaatggtgtagccagcatggaaaatgatttggcagtttcttaaaatattaaacatacacttaacctaagatccagcaattccacttctacatatctacccaagaaaaatgaaaatgtatgcccatacaaagatttatattcaatacaagaaaaacttgggaacaatcagatgccaattggtaaatgtaaaaacaacatggtatatccacataatggaatactgttcagcacgcactgcaacatgagtgaacctcaagcattgtgctaagtgaaaaacaccaaaaacaaaatactccatattatatgatttcaattatatgaagtgtccagaaagaccaacctaaagagacagaaactagattagtagttgactggggagtgggaacaggaattaactgcagatgggcagaagagacctttttagggcaatggcagtactaaaaaactggattgtgacaatggttatgaagctctgtaaattgactaattgggcacttaaaatggggaaaaataacttctatgtttaaaaaaaaatgtgtacttgaaaaataagatggaggaagtacaccaaaatgttaaccaaaccaaaacaataaaaccactaggtgaatatgggattcttgttgccagtaagataatatgtgtttatgttctatagccttttggctatagagacagtagcatttcctatgattttgcagactccttcatcatttatatgatagactattcaactataatatgttggtttttaaggcttctgtttgaactatgttttcaactttttcctgatattgccaaaggtgttcttgtcactaagatcttatttctatttgttctcattaatgcaacagctatcaactgtagctatgatatttacctttgttttcgtacttagacttatagcaaattcacagccttaacacactgcagacactggactcctagtgtcttaagaggttgaaatcaaatgttggtaactttttcttttatactactctgctgaagttaccttttagaaaattaaaacaagacaacaaaactatttatctgatggagtaaacctcccagcgattatagacatgtagttacagtagatttgccttggttttaaaaggttttcattgtccttatgttcaaagataccactgttgaaagttctcactagtggctacaagggttcattacgaaggctgcagtccattacacatgggttctgcctgctgtttagagttcttctccttgtcttctcagtttatagctctaggctttttgagtacttgatttacagcaaatactcaagcccagtcagagggtggaaaactttagactattctttttcgcagaattcactattctggatccacatttggtgttagaaaaatgtaaatggataagaggagagaaacatcaactggggtcaaaagacagcaggggcaaaccagcataggtcagcaaaaagaaaagatggaaagaggaaggacctccattggtaggatgagactacaatagcagagtggatctgttttgggaagacttaattaaataggacagtcatgtcattccagtgagttccaaagactccattgcacaagtagcctcttagggaagttcaggaaggtatgactggccctgtcccaaggctgaaaatctctgaggtgtaagtaccaggtggggatctgtgggaaatgagagatttttcctgtgcatgtcctaagagttttctgtattcgtattctgaaatggaagcatagttctctggacagattgccttcctgtgtggtttccactaggttaggtctggcaagggaggtcaacagaagcttcatatggtgagttttctcccagccagagacttaaatactttccagagctgtagcggggaactctgaccacggggaacccattgcagtcatgcaaataagtgctttgccacaagtcaggttggtttatctatgcttattctgttaaaacatactatataaagttcttaagtgtcatttgtattgtctttactagctgtcttgccactttttgctcttgatataatttaactttcagtttcagttcacgtttggcttatccccagctctgtggtggtggctttcagcaaatgtggctttggtaaaaaagactttggccaccatctaagacttagctgcttgtgggtctgatctgtaatttgatacctttggagaccgtacctctggttgtgatcatgagctaggtaacatgttcagatagcagggtgatttgacattcaagataaataagttgtttatcagtaggaccatgtctgatactacttagtcaacaaagcaaagatctgggcatatagtaggtcccaactgttctccagaaacatttgtgggaaatgtcttttttaagtataaagatgcctgggtaccatgtctgatttaataaattgaaaggatttaataaattgaaagtattttgaaaagtttccagtaaggttctgatacccagccaaggctaagaactgctatatgcacatgtggccctcagagtgtagcaagggtgccagagcctgtctgcttgggctcaaatcttggctctttcatttactctcggcaaacacttaggcaagttacttcactgctcccagcctcagtgttctcatacgtaaaatggagatgctaagactgtttcatgggattgttatcttagttaaatgatccaataaagtgcttaagcacacttttgacttcggcagttgaccaggaaatgctatttcttctttggtcattatcctagatcagggaccagatctggccccctgactatttttgtactgggaactaaatggttgggggggtggtggggagtcaaaaatattttgtgatatgttaaaatacatgaaatccacatttcagtgttaataaataaagttttattggaacagagccatactcattcatttatatatcatctatggttgctttcccattataatgacatagttgagtagttgtgacagaaactatgtctcacactttgggaggccaaggcggttgaatcacaaggtcaggagatcacgaccatcctggctaatgcagtgaaatcccatctctactaaaaacacacacacacaaaaaaaatagctaggcgtggtggtgggcgcctatagtcccagctactcaggaggctgaggcaggggaattggttgaacccaggaggcagggcttgcagtgagctgagatcgagccactgcactatggcctgggcgacagaacaagactccatctcaaaaaaaaaaaaaaaaactatgcctcaaaaagcctaaaatatttactatttaacccctttggagatctcctagatctttgcagtgttcagagcctaacaggttaattgtcacctttctcaaatggacaaaagaatgaggaagacttttcacttgatgttctcatgtttttggtgccagtgttactttccagggtatgttgaagggcacataaattcaatagctattttaacctcagtgttacaaatgcatatccttggtcacgtgtggcattgctgtgatgcagtttaatgaattacctccaccttctccatactgtttatccacagctctccatactgtttatcctcagcatttgcttcctcataaggaaagcccggatcagcttctgttagcttgcccagcagtcaccaccagcatgcagcagcagttcatggataaacgcctcaagggcatttaataacattgcagtttagtgaactagaatagttttccagagaactgagtgtcaattttaatgtttttttcctgatactttatgaaacaccagaggcatctagctgtgaatcccaaggacataagggtaacaccattcagggacatgcctgtattctggatgccttgttttcccttttcataccccgaacagactttgtgttatttatccgaatgccagcttccaggatttgtttttcatgcttaggcataaagataagaatccaaacacggagggaaatagaaggctagaatcctgcccagtagggcttcggtggagaatgtactccttacccaggcccccatccccttgttgaaggctgcacgcagccccaggctgcatgcctgggtgctcttgtcctttcaaggctcttaatctgatttctccagattgaaatcaagccagccaagatgttttgtttggcctgcataatttttttaacgtttttaattatttgccaatatttaaaaatggggagatttcatataaactctcgacgtccagcctctcctgaagtagtgaaaggtctggcaacacggagcctgcattccagcatgccagccattggcaagccctgagcagcagctgtagcagctgctctttccttgagccagggcgtgcaggctcctgctgcctcactcatttcatcatctcatggctcagctctgtggcaagatgctggatcccacatttcctagatgcggctcaggtagcttctcaggagcagtcttctcttccctgttttcttagttataggtaattttcagttgtccatctgaatggctaaatggtcatggagccaaatgcattcatggggacctagatcatgatttggaaaatttttatttttgtttttaggttgaaaagacaacccaaattgtggaaagtgggtatataacatagttgttgtattactctgttttcctttttaaaaaaaaaaactcttcaaaaacaccaataaaaactgcctagacaatatggtatgtagactgacaaacaggagatctttcttagcttaaggcccaactttagaatcaatattaatagctaagttatttagcaacctattctgctaagcactgcccttggcatctgaaaatgtttcttctgcacttctcaataatctagctaggtagactatacttttacaattgcacagaagtggaaatagacccctaagaagtaaagtaacttgcaccaagtcatagctagtgagcagatgaatttgatttcaaccccaggtcttctgatttaaagtctgacatctctccattacctctgtgacctggggtaagtcctagttagaatgaaaacccctgtattttcttccataagaagtgaaactttcttttcaataattcaagttagtatttaatattcaagcttcaaggagaaccatttgcaccatttttccctgccttttggagctcaagaaaaaggggactatgtaagttgtaaagtattccatagacagctacagtgactgtagtttcgtggcgtattcattttatggctttactggatgaaacagaatcagattacaaagctgtcatttgcaaaagttctgagaacgttgcatgccccattgaagaagattttattttaactttaatcagaattcaatttaaataatttagagtgtttttaggcagaatggctgtctgaaatgtaatgtcttcttaaactattagattgtattgacttaaaggttgagtacatgtgaaagaccatagcctttggaacagccgcagaataatactcagctttaatttcatatgggataaacgtattcaattcagaatactataaatatgtaagcagaaaactgaattgtgagtaagttattaggtaacactaaacatacataaaaattccatcattattgggggtcagtttctcaccttttgtttgacattccttagactttaacaccatgtctaatgatttctacttttccttgggtttgctggtatgattgtctttactaagatttttattatactgattttaaaatgaatttccatgactttgttgaattttattgtacagctatttaatcagtctatcctgagtcatatgtagaaggcactgtgtgtgctgtggcactgtgttgaggcagctgtgactcctcctagagaagtgtggtcttgtctaaaaaaaaaaaaacccatcattgtccttcctctccttctcaactttggagaaattgcatttctcctttaaggttcagatgaaagatgacctcttcacaaaacttttgtgatcactatcttctgtcctcctctccttccctcattaatttcttcttcctctgtgatctcttaacagtttttataccttaaaatgcacttaacacattttatcataggtaattgtatgtagttctgtgaacttcttgcaagcaaatatttttattacgaaccttcatctgcacaataaacacgatgcctatcacatagtaggtccttataaagaggcagaggctaaaaccacacaataaaactacttttgttttatcacaaatggatcatgcgattaaattttgattaaatgagaatctatttttctgcccgttgcagaccagtaaaaatatttgaaatgtacttttcatttaaattttcattttattcaaaggaacatctcatttacttttagatattttcttggctccctatatgtgtttgccttgttatatggtgatacaatggctaatgacccctctgggacaaggttttaaacagtaacttctactactctgctaggcaaggcattgacaggtttgggagtaaattccagggtcacagcacaagattagtcctcagctgagaagggacagttgatcctgccccaggcactagcctgttgctaaacaagaggactacactgctgagggtagctcagtcctaacttcagacactaagggtgtaactacttgagccatgtaggttccatgaggctctattgatgcataagatatccccaccttggagaggctgtgatatagataagaagaaatgacatgcaaatatcaaccttcacatagagaagaaagcaatcattgctactaagaacttgccaaagcaataagaacaatgtgaaatgggaatacttttaatagcggatggtgttcttgcaaagcttaattaagataatgcagtgctgcggggcccaacttgtgatagtgctcagccagtgttagctggctccttgaggtttcaatcaagtgtgcaggtattttagagagaggagatatttctgaccagggttagggaaggttccaaggaaggttgaggttcagtgagggccttagacttggtagtgaggatgtgaaattttcgactctagtctccagaagggaaagaagaatgagctgatgataattgacaaagcctccattatgtaaccatttttacaaattccattaattgatggctgattattattattacgaataataaaactaagtccaccagaaaatgattggatcagtccagctatatacacattgctggtatctgatgaatgccatccaccttgttttgacagatggaatgcagaggctgggaaaactaggctatttttggcctgcaagctgtattttgtttatctccatcctgcttcatagaggcacattatttcacgtaacttgatctgaggtgttaaccaaactccctctttctttaatattcttccagtgacgccatggtttatcaaatttaataagctcctctaatttttctttgacttaaaatattacttgtaggctttttcctaatatattttttcagttttataattgcaacataaaaataaatacataagtagcctccttaaaaacatctagaactgcagtgagcagagaaaaagggcaatgagccttccatgtctgcattttattatcttacacctaatgaaaaattctaaagctttttaaagattctcgtgtgatcacagtttggctttcagcactgttggagctgtttaaaatttgtgttttaataggtatctatacacatgcatacacaatcttatatttttcgggttttatttatctcctggagtacttgccttagaagtattcttttgtaagtaatttcccttatctttgactgccattctcatcaaagaccattgtgactgctttggaattcttttaactagtttgcaacttaagactcttatgtgggataaggacagtgattactccctttcctgtcttcagcagtttgctctgagttgggcttcataggtgtgtaccctggccacaggcaaggccatctctggatttactaccaattcattctaatgatcactttatatcttttcgtcaaccattcctcttttcaggaccatagaagcaaagagatatacacacagggcaatagagattaatctcatatctacattgtacagatgagggaagaaacttagaaaggctttaatttcacaggatgacccagcaagttagtgatttacagattgtggtggttttgtatatgaaaatatttaacatattagtgtaataatttattggtacttgtggatagaaaaggcttttgaaacttattatgattgctttgcacttattatgtctcagaatttattggcaaaccagcaatataggacaggttcctcagacagaaactcaggatgggagcaaaggcccaactctgcctcaaaccacaggtttttttcccctttgggaatatgcataaaagaacactgacaagtaggaaaggaaattaccttgtcttaattcactgggcttgggtctggagcccactggagagaacattaggaacccagaattagtggctgggtgcaatggctcctgcctgtaatcccagcactttgggagcccgaggcaggcagattgcctgagctctggagttcgagaccagcccaggtgacacagtgaaatctcatctctgctaaaacacaaaaaattagcccagcgtggtggcatgcgcctgtgttcccagctacttgggaggctgaggcaggagaaatgcttgaacccgggaggtggaggttacagtgaaccaagactgcgccactgcactccagcctgggtgacagagcaagactccatctcttaaaaaaacaaaaacaaaaacaaaaaaacacctaaaattagtgaagtatcacaccaaaaccggcctctttctgcccacctttattctcattagcaaaaagagactgtcctctagaatgtgacccatccagaccctcctcccaggagaggagggaatggaagggaaggaccttgctgacatataacttggagcccaagggaaagttgcacctgagaaaccctggacagcaagagaacattgctctgtagcaagggcaggctgcaagttgggagaaacgcagcaatggtgccctaagcaaattgatcaggccagtatcatggattgggggagtgggaaaaggctggaacattctaggaacttctagcattaggattaaaccaagacttaaggctggatgggatctggagatggcagacctggaagggcagaggaaggcgcaggcaagtaagggtgagaagcaaccgtcctagccctaattggcttctcctggtaagctaaaaatcagctggtggttttgttatataggactctaaaatcaatgagtctttctcttttacgagtgactgaaatgatagttaggcaatcagttataaatctatatgctttcttaggccaggccgagtgtctcatgcctgtaatcccaacacttcagaaggccatagcaggagaatcacttgaggccaggagtttgagagcagcctgtgcacgatagtcagaccctgtctctacctcccacccaccccgcaaaaaacatcagaaaattagctgggagtgctgttgtgtacctgcagttctagctactcaagaggctgaggcagcagcattgcttgagcccagaaggttgaggctacagtaagctgtgatagcccacccgtgattgcaccactgcattccagcctgggcaacagaatgagaccctgttgcataaagcatttttggctttttcttttttttttttttttttgagactgagtctcactctgttgcccaggctggagtgcagtcgcactatttcggctcactgcaacctctgcctcctgggttcacgccattctcctgcctcagcctccagagtagctgggattgcaggtgcatgccaccacacccagctaatttttgtagttttagtagaggttgggtttcaccatgttggccaggctggtcttgaactcctaactttaaggtgatctgcccacttcggcctcccacagtgctgggattacaggcatgagccaccgcgcccggccattttttgcatattcttcatgaaaagctgttgctttttgagagagagaaaaaaacaccatgtaattccaaataaactaaattattatttttctctattgtattattttattattattttccttctatatacaagaaatggtgacaggaaatatttctttggaaattaaggtaataatgggacaaactggaaaggcctaggatatgaatcagaccaaggtgggataatatctggagtatgggtacaggtgtcacaaggaagtccagcccagaaggcagagtgcagaaactgctggtggtctgagtaggacatcatgagagtctttgggtgtaggaggagactgcatttagaaatctcagcaggtaggctctcaagaaaggcaggtgtcagagccccagtcttgggactgggctttcgagggagtcagggagttaggaattttgtcctgtaaggacgggggtactacataggcattaacacaaggaatgggacacaggggaatgaggcacaaaacctattaacagaaattgagcccaacatgcaagcataattggtagaaaagtaacttaacacagagatcccagctttggaatagaaggactggatccttctgcccaaagttgggattgacctgaacagggctgaatacagtcctgcaaggaggtaccattacagtgaccattctacggatggacgtactagagcttggtgtggctaactgtagctctcacagtcagtgagtggtgaaaccagacaggaaccaagccatctgctcccggaacagtgctctgccattgcactaaggtgcttcctgatctcaagggctgtgaccttggggaagagtagaaagtttgttgagcgccagttgtgttccacacatggttctaggcattttaagtgtacagtagttccccgtttgtcagtggtttcatgctccttggtttcaggtccccacagtgtcaaccataatctgaaaataggtaagtgtagtataataagatattatgagaagagagagagatcacatccaaatagcttttattacagtctattatttaattactgtgttattattagttattaatctcctagtgtgcctaatttatcattaaatgttatgggtgtgtgtgtgtataggaaaacacagtatatatagattttggtactatctgtggtttcaggcatccactgggggtctttggaacatgtccctcatggataaagggagactactgtactgttggcttaatctttataagcccctgtgagataatttttgttactgactttatggatgaaaaaatgtaaggttaaatggcttgttcagtgttccatagctgctaagtgacacagtctgctataacccactgcatctgaccctaaagcccattactgccttatgaatcgcattaggaacctctcttgtcctgagtttcagctgtaaataagaactaagctattttttagatagaaagagattttaaacaaatttagccaaatgatcaaatatacaaggttaaaacatatgtttaaagccttcttagaaattgtgaactagatgtttttcatgcatgcgaagattcagtactgcttctgtttgactggccaggtgattctagtgagcatgggcttttgtcagacttgagtttgaatcctgccatcactgctggccctgtgaagcaccatggacagctacccatttccttgctcaggacatgaggatagtatcacctatttaaaaggttatcataaggacaggagtagtggctcacacctataatcccagcactttgggaggatcacttgagttcaggagttggagaccagcctgggcaacacagcaagatcacgtctctactaaaaatcaaaaaaaattgccaggcatgggcgcatgcacctgtagtcccagctactcaggaagcttatgtgggaggagtgctggaggctggaagatcaaggctgcagtgagctgtgatcatgccactgtactccagcctagatgacagagaaagaccctatctcaaaaaaaaaaagattatcataaacattaaacataagaatgtaacttgcctaacccagtaacctggaacatagttggtagcccacaagcctgagtcttcttccctttcagctcatgctgtcatatttccatggctgctccagcacacttatgatctagtcccttctccaaccctgcccttctcagtctcagcagatagtcctatttcagagaacaaaggcttgcagctcaatatcccacacagttcctctcccttccactctcttatcagattctaatcttcaactccacatgataaaataaccatatacaaagttctaacgtatgcagattttaccccttatatcactttttcatcataagcataagaattttggttcaaacagactgaaatttgttatttctactgggaataatgggataaaggggaaactggcaggtttagaatatgaaagcagaaaatatctactcggctttgacaagctaagtaggtaacttgatggctgccatttttatctcaaacatacatattatttgcttctttgagacaatgatggggccaagaaggtagaaaacaactttgagttataaaattagaaaagtgtgagtgtttgcatagagggccacaaagaaatgatttaggatggcgttggcttttctcatttggatgagtgggtgtgaaggcaattcagctatggaaaaacaagtttggagccagagagtaacagagacaaggatgattaattggaattatatctcccaatcaaagtcttcccaaagactctttctttggaaagagtcatctggattctgagcttcactggtccctttgccattactctaggacatcttccactgaactactagagtgaactcccaaaacacaaattagacctggactggcttcaccattgcctaagattcatgtccagactgtgtcatatggtctaacaagtcctcacggttttgctctttctcaattctacacatacaccccactgtgcaccagccacaaaactcacccatcccaaaatatatgatgccttctgacaacattttttttttagtgtgtttctctgggtaggaagactttctaattccctttccatccagaaaacagtcctcaagatgcaaatctattgttatttcttctgtgaagccttttctgatttctgaggcgaaaatagttactttctcttctgtattctcttagcacttattcatgtgccgttcttgccccagggcttaatttgcttaggagccactctcccacactggattatgagtccctaaaggacagggatctcttattcatctctcttcccagtgctgtaactggcatgtaatagccacccgataattatttgttgaattaataaaagagcaagcagacatattgaattaataatgcctaacttaacaaacagaacatatttactgtggttaaaaacatgtatcctagaaaaacctctggaaggatacagagaaattgataacagtggtttgccttgggggaaggaaactaggtggttagaggataggagagggggagagagagagccttttcaccagatgtcctatagtacatcttgaattttgaaccacatgcatatattatagcattatagacccaaaactagtctaatttaatatttgtgcatgtggcaaaacaaacacatatcaaataatttcatacttttcttgcaaacattttagattgttggtagaagtttatgattcagttgtcctttgttaccaatatctgctctcatctgggtttcatttcggtctagagttatattgttgttcagaaactgggctatgcctgagatggcaaataaggacccactgaactgtgttgaaaccttcaaatcttaacaaatagtttgaagccagagtggctgaacaacagtcccttctctctatcctggcctcatttctacttttgaggtcttgagggattagctggttgggcaaaaatctgatcactgagaacccagcatgtaggatttttaaattcttgcaagggctgtgcatatgttggcttccaggtctggagtttagaggtatatttagatcaggcaaaaagtggtggatcaggcagtatgtaaatttggcatcctacgtatgatgtaattagaattataggtgcgaccaaattcatatggttctcttttcccagtgtcagagtggttagtgatgtatttgtctgaattatcctttttaaggtggcctaaacatgtcttgcattccagaggttctgtttctgcaccattttgtcctgttggtataagaatattaagtatacttctaacatggatggaccgtagacagagtaagtgctgtaatgaaagtgctgtaagtatgaatcccagctaagctagccacataattttaccactccgaatttgtcttaattgacaaaatggggataatatgaccaatctcataggactccccccataggatttttaaaggtttaaattaggtatgattggtaaagcacctgtcacataataggaattcaacaaatgctagttccctttccactgccctgaataacgtattagtttatctagataacagatgtttttgcatagtgaagtgcagctatgttaaattcctagtattgaatgtgtgagaaatgtaagtcactcctcctgaaaaaaaagttccttgttccttgttagtaacttacttgctttttcttactgcgcaccataataagtgtttctcaaggttaaaatcttacatcacttggattttgtcatataatattatctttgattatcttttactaaaatatacataaaaattcttatgataattaaaagtacattttaaaaaatgaaaaacgaacacctttcacaacaagaagaatgtttatgtgggaattttgtgcttatccacatgggaagaactcttgaaacaccacaggaaaaaaaaataatgctaatctgacttctaaattaaaatgttagaatcctaaaaacataatttcaaaagatttgtgcttcaaggtggcaaaggcaacctgtacttacttctcaagtcagttctttttccccctggcattttaaaacatgttaatccaggcccactcataaacctcagcagcaggggatcattgttcattggtttattatgggcagaccaaactggttttaactgagcagaggaagttaattatcgaatgttttagttggctccaacaatgaataaccagttcttgttggacaccgtcttaactcaccatgcgacattataagaacgggggcggggcggggggagggatgggggaagggaaatcgcccatcagaatctgcaatgcgggaatttgctggggctgctctaatctgtttcccaggttgttcgaaccagttcaagagcagttaaacaaggttatgtaagtgacatgtgatgtagcccaaaatagtgactgcaaacacaggctgctgttgctgggcagttgtcaactgcttaaaaaaaaaaaaaaatcttgcagcaggacaacaaatggatctttaaaaatgaaaaagagatttaagcacaaagttaattttaaaaaggatttggagaaattgcctttttgatactgaaaataaatgattttttttttttaaatagggaaacttacattgtacataaggtctggttattctagagtatcgaccggggtagttagtgaagacgtacttgcagccagtttggtgctctacgaaacatatagttcccatgtttgaatgaacagcaacaacaaccaaaccctcagatttattaatggctctggcatataacaaattattaagcaatagatcattcagagagtgataaatatcaaacgatttttataagttattgtcccttttatttaaatactttgtatcttcaagatatgaaaaagaaaacatttcacataacatagggagcataaaaataaggttttaaaggaaaacaagattcagtggtgaaatttgttcaagaatgttttttagaaggaaaacaaaaacaccagaagagggtttaaactatgccttcactgtcatcaacatttggattcccataatgaccacattccctgggttccctgccttttaatgagctccagatctgggaaagtaggaattaaggagcaagatacagaggaagggggatgaggggggaaccttagggcctttcttaggattcaagctcaggagctcactctgtatgggtccgtatttgtgagatctgaatctcagggactctggtgttaactttgtctctcttcatctctaagcgacctgtaaaatagcacatttcccacccggattctgaacaaattgagttataaaacaaaggagtggctggtggaagataaaacatcaacatttgggagtaaataagttgaaatatatcatttagtgataagagccaaaagggcctgtcatctgagcccccagattaggtacaggcaagggaacagctggatcaggacaggcctccccaagactggaggctgagcacctgctcccagagggagctctcccacaaaaggatgaagccaatgtggaggcaggcaagccagattaattcttctcaaatgtactaatgaaggcagactgagtaaaggggatggagagaggcctgtgatgtagcatcttggagcttcctccccctggaaaaaagatcaagggtgggcagaggtgttcgccactggaggctcaatctgaggccccagcaccacctctctgtggggacgggaaggaatctgggtactggggcaggagcaaatgtcaatgttcagtatgttttgattttccatattcagtcccccatatgtaaaaggctatgttcccaatgtgtgataagtcagttttttaaaacataaaattttgggcattctgttcataagatgtaattgaagcacctcctgctctgcaaatccttctttaaagattctcaagagtatttgtaggtgtctgctgtggtttgggggcttccagaacctggttcttttcatatctcatatctaactctccctgagaaccgcagtgtcttgcttgataaaagggtactaccctgacgatcagccatgtgtatagagggatagaatgttttccagatataggtagaggagtgggacactgatggggagttgaagggggtatatggatctgtagatgtcatagaacatgaaattagtggagccagagaaaaacagaaatgagactcccttctaagacttaaaagaaaagtaatgggggagatatgccagaagtcctgccaccacccatgaccaaacatcagccagggttggcaggcagaggagatggtgcatgctgactactgtctatagttgaggatgtctgtagcaatggtgtttgtgattcaggaccaacctatatgtctgtacttgtgaagagagatacaagcaggcaaaggaccaatcttctgagttcttttatttgttaaaataaaccataagcatattgtccttcacatccataataggaacaatacatggcaataataaaaacaccgaaactaaaatcaccaataaacataatccaatgttattaggtcagatgcctctgaccaagctttggttcctttttctgaaatggttgtaagttttgctaagcacatctttgagctctggcctgcccatctcccctccctgtgccacactggctcaactcacattgaatatggagcttataagagctcggacttgacagtttaagcagtgaagggccctagaaggcctttaaacagatgatgtcataatcagatctgtgattcagggggatgactgtgcaggctctacagaagatggagaaacttctgaagaggcccagggccctaagtgcctgccatagaggccgcagtttcctatggagtgccccctacaccactgacgggtacagatggagggaaacaccagggataccccttagcttcatttcagccaaaatgtttctctttctttttttaacctattgatgtctgtgtaagagtttttttttttaatttaataacttttaaattgaagttagaatcatttgatttagaagtggtgtattagtagaggcaggtagactagctacaagtccattgaaattatactgataatatgcagtagtacatgataatagtaataatgataatcacagaaatacagcgataacagctaccattcattttatccttactgcatagcagtgactattttaagtgctttgtgtggtatattattttcatgataactcatgaaataggcacttttataattcttgtttaacaagtcaggaaactgatatatgaaaaggctaagtaacttctctaaagtcagatagtaacagggattcaaactccatgattcagaagtttaaccaagagatcctgcaatgaggaaagtactgatggatatagatgggacacagaagacacttcgaagggagaatcatcagttctttgccagcagttgaatgtagaggattgtggggagaagcggtgtaaatcatggataacttgtagcttctagttcatgcaactccttgtagctttaaaattgggcatatagcaggcgggaagggggctgtgtggggggtggggatgtggcatttgattagtgaacaaggagggattgaagtgtcagagacattcaggtgggagcattcagtggacaggtatatgcatggggctgaaacccagaagagaggaaggggcactggagcccgcagggcattggcgacctctggaagtggctgggctaccagactgtgtggacactgtctgttcctcctctttacccatcctgcctgtgcttctgccagaccagttgcttactgaacacttaactgtgtctcagccttccttgggcttattctttgtgtggaacacctgtacatctgtcctttccatgtttcattgtatgaacatttctctagaacattccttaaggcttatgccagatgctttccttctccttaaagaccaattcatcccccaactccaatatggtcccttccttaagtcagaacatatcaagaacacatgatatatctttttttaacttttaagttcagaggtacatgtacaggtttgttacatagggagatttatcttaatcattttaatttccccaacctactcctaacccgtagaatataaggtcttggaagaaatggactatgttttacctttttatattctgccttaaaaatcctcgtggaatggaattaactcattgtctgggaacatatgttaaatcctagaacttctttttcttgttttccgagggccttgctcctcaacctgcctgtctgtaaatatcagttacctctgccttctctcgtctgcaggggtacagttttcctcaaggctcctggcaaaatggaattcagtctcccaggctcacctttgcttctgcccctgagtgtatgtgcctacttacttttaagaatcttgatactaagtaataaattaaaaaaaagagatagcgagagaaataatacaaggaagttataactttccagaatcttatcccatgcctatagtcttgggccctagtctagaattcttagctgagttgcagataggacagtcctggctttttatcctgtgtttaccctgaagatacagttcaacacgctcatatccttgccagcttttagaaaaaaactaaagacttaaagatgggttcggagctgaatggcgtttgtcttggctcagctggactcttttcatctagaggccttcctactcaaaggcgacattctgctcccacaggacgctctttactcacttaactttcattacgagttgatttttgttctttggattttctcatcctacttttttttttttttttttttttgagatggagtctcactctgtcgcctaggctggagtgcaatggtgcaagctcactgcaagctccgcctcccgggttcacgccattctcctgcctcagcctcagcctcccaagtagctgggactacaggcacccgccaccatgcccggctaattttttatatttttagtagagatggggtgtcaccgtgttagccaggatagtctcgatcacctgatctcgtgatccacccacctcggcctcccaaagtgctgggattacaggcgtgagccaccgcacctggccccattttttttttaagtgagctaacaaaatgttcatcactaccacctctaccacctttttaaattttttttagttttttctttttttttttagttctttcttcaggccaggctttgtgcttcttgctttatgtgtatattattcatttgaaaccatttaataatatagaaagtaggcattactctttgcattttatagatcaagataccaatgctagaaacattgagccacttggctgaggctctgatagctccttattgactcaggtaggattgagacccagatggaccctggttgcgaagctggtccccttttcattgtgctttctcctccctgcccttcgtttttctacttttctgttcttatgctattgacgcttagagacctgcatgtcacataatctgtattttctcagttgggaccaggccaagtataacaaaaagttgcttcttgatttcaaaataattgaaaattgtaaaagacaatttttattgaatgcagtaacttttaaaataatgagattaacttttaaacacttactgaattattctacagttaaaagcaatactatagtttaaaacattagaaaaaaatgatacctttgatttatttttaaactcaactttgttattgttttttaagtccataaggcatttttgcttttattttccctttaatttagttcatctggtcttcctataagtctttcaatttgttttacacgtgcactaactgacctgagcatcttgctacttcattcaagtttatcctaaccttggaagctttctgtcttctagaatggctgccttatgcccaaaaagctgccccaacctcaagcaggaggtacactgaactcgagtacacggatggatgactaaagttccctgagtcctactggacagattttggttgtgtgttgtgttggtttaatatgaattaaggaatgagacacacattatatatttgtgtaggtataatttaaattgttaatgtttacacaactaaaaatataaacgacaaaattttctgaaaatgacatgtctgcaacagtctcttacaactctcctatcctatatgtggaagatgaaatattgttttcgggagaaaatcatcctgggttgttacagtaacaaatttttgaagggtatttttttttaaaatccttttagaacaatcctggcatttgaaggtctctgtttttgaacacccatagaagaaaatcttccaatgtgttcataagacagtggccatttttttccattctgtatgcctacaatctaaaaagtcttagttacatttactgaaaattcacagaagtgaatcttagactacagcagaccaacccttatgcaaatgattcgtgaccttgcaacatattggaggttccccataaatacttattgaattaaaacaaatttaaattacatttagttatttctttggactttaaagtttattcagttcagtgtatattaaagatgaaacctgtggttttatattcaatctcatactatgcaaaaggcacataatgtcagttgtcagtagaaatgctggctagtagagtgtgcttctctcaacattctgttgcttctcatttccaaagagcatcttcaatgtcttattagaccaacagtaaattatattgcaaattagtatttagaaaaacctctcctggccttgaggcacagcaatgttatcagacttcctaaattattcttccaactctacctttttgggaagtcactttatcaattctagtatgagtttcttctggtgaatagcagcaataataatctcacctatgtcatagggttgttctgtgggttaactaacatagaactctaatgtggcattaaaattttattttaaaagtggaaacctctctaagctgctgtacaacatcatgaaacgttatatttatcagttaccatttttaccatggatattgattgcctttgtgtaattatctacacctacccatattcattaagagccttccatttttagaaaaggcattagattattataatggcagggtttcatttcttcactttgatagatttccctattctgttactattgttttattgttattactaagatttactataatattagagaatatactttagattaaattattttaattacattaagtgatgcacattatttttattgagtatttactgtaatttacttagtaattcttaaatcaagggaacatgatggtactacactgaagggagtggtttggagcctgttcactactttgcagtaaacagtgggcctccctctcttcttttcaataacccatgactcttcaggcttcactctccagtctatgctcacccaccatatgatctcacccagttttatggcttaaaatcacatacataagctgattacatctctagcccagccctcttcctaaccgcagacctgacacctccacttggatgctgatcaggcttctctaacttaccatgtccaagactgagctggggtcattcctcataaaccactggctccttctgtcttccccttttaattaatgacagtcccctttttctacttgtttagcccaagaatcttaaggccttcttaactcctcatttcctctgatctgtcagcaaacccttgcagctctacttttggaatacatctagaatctcaccactgccactgctaccacaatgacccagcccactttcctctctcccgtaggttacaataattgcctcctacccctggtctctctacttctgtccttagtccactgcagtcagtttcaacacagcagccagagtgatgctgtgaaatgtaaatcatatcaagtgactcctctgctcaaagccctctagtctagtggcttcatctcagagtaaaggccaaagtcttgaatatcacctctaaggacctatgtgatgtggctcaccttagctctttatctctgtcttttcttactctcttctcattctcttctgctcattcaccctggtgtccctgctgttcctagaacatgccaggtaatcagccctcaccttcctctctaccacatttgcttttctttctttctggtgtatgttcttccccagatgtccacactgttagactgaacatctataggactgatagatctatagacctttatttaaaaatcaccttccatgttcccttcatttttctccctagtgcttattattatctgacatcttacacattttatctaattaccttgtctattatgtctcccccaaatcgaatgaaagttaagagcagaggcttttgtctgtcttgttcatcactgtatccctagtgcctctagtagtgcctagtacgctgtgggtgtttagtaaatatttttgaataaatactaataaagctaggctacaatttcatattttgccaatagatgtcactctctaagcctgtgctgtgcccacatctgattttttttagttccatattgttttacagaatgaaatagtttaacatttccaattgtataatttgaaagtgaaattactatgaaatcccagtgaagtcacatgtataaatggtgggcaggcatagcagcttaaacagctgcagtaggatttttgtttagattggtgctgttgtgatgtctgcaggaaatgtgcactattgcctgaacctatgcagctatcaaaaaattcaaataatggagaaatatggctctacttatattagaacatgtttgaaaataagtgtaatgttatcatatgtaatctaaagtctcagctgcattaagctgaccatctcctcctctatattatccacaaatcatgtacttttacttttttgagaaagagatttcaaggcaggaaagaagtagttttatattctgagtatacatattaatgttttgtactagtgtactctattttaacagttattttttattattttaatcagggcaacacaactatttatgtgctggaagaaatgattgcatcattgataagattcgacgaaagaattgtcctgcttgcagacttcagaaatgtcttcaagctggaatgaatttaggaggtaagttttgtatttttagtttaataaaaattgttaataggtaatgcaacagcactaagatctgtgtactctcaaaattgaaaacgaagccaacagggagcaaaggtttctgaaaatctgatgagttctgttttcatgctaaaacattttagaagagaaatatttattagctggagtcaaaaagaggtatgttttatggctatagttctagtgaatttttcgagcctgagtttgctaagtttcaagaactaggcacttaacaaaaaacaaaacaaaaatgaatgacttttatataaacccatagctaatagttcttattgccacgtctgtttagaaattagacctatatgtgataacattacccacatagagtacatacctaactttagaagtatgtgtaataaagaaagatatatatgaaaaaagctttgaaatgttacagtggctcatcaaaagaggaggagagggtaaaaaactagaaccaaatgcgaaagtatacaacatccatggataggaagactcagcatcctcaagatataaattttccctaagttaatctgtaaatatagtataattctaagaaaaataccaattgattattctaagttcctaaagaagagccaggaatattctagaaaagacaaataatgggaggaactagctctaccagataggaaagcatattatagctacaataattaaaatagtccgtggtatttgctcatcgattatcagacagattaacagaaggtcaagaaataaatccaaataatataggaattttgcacacaataaaactggcttttaagatcagtggagggatgggagattattcaatagaaaatactatgacaattggataaccatctggaaaacaagaaagttgaataccagctcttaactatatacaccaaaataaatgctgatgcttcaaagatttaaacttagaaaaatagccacagaagtactaaaagaaaacatgaatttttcttaatactctccaagtagagaagacctttccaaatcccactatctatgggtttcatattgcagattcaaccaaccatgaattgaaaacatttggtttaaaagataaaaatacaaaaatacaaaatttaaaatacagtgtaacatatatatataacatagcattcacattgtattaggtattataagtcatctggagatgatttaacacatacaggaggttgtgcataggttatgtgcaatactggattcaggggatcatggtggacaggaggcaggactagattgcagctccagaaaaagcagcatgcggaggcttgcattgtgaattttagctccagatccactgcaagaacaaaccagcaatcccgagaggacccacagaccctctgaaggaagcggactgctcccggaggacctgggagacaccccagttactgtgagtgccccaactgcagaagtgggaaagggagaccctcctctcctgaacacacacccccactggagaagctgaaggtctgtttgtgggagaagtttctgacttcacctggagctgagtcaacttagagagcccagtgaaatacaagggtagaagaagcagcagcaaggtcctgggagctctctgggtccccaagcagcccactcctacctgacaccacagggatccatcgggagggtggccagaggagcagggggtaaaactccacaaggagaaggaattctctagctgaactttgtaacaatttgaacagggtgagaagcctccttgccagaactcgggggatggcccaaatcaggcctgcagacttcacaggcaggggaagaactaaagcccttttctgtggctgctgggaggcagatagccttgggcaagtgttcaagcccctcttgccctctccctggaaacagacttgggctgttggggtggctcagtgggagtgaaaccagccctttagtttgcctgggagcagggtgaggcctgtgactgccggctttcccccacttccttgaaaacctgcatgactcagcagaggcagccataatcctccttggtacacaactccagtgaactgggaatctcgaccccaccccccacagcagccacagcaagacccacccaaggagagtctgagctcagacgtgcctagccatacccccacctgatggtccttccctatccaccctggtagcagaagacaaagggcatatactcttgggagttcttaggccccacccatcacagttccctcagcacactactacaactgatgctttctggaaattgccacttcctggcaggaggccaaccagcacaaaaatagagcgttaaaccaccaaagctaaaaaccctcacagagtccattgcacccttcaccacctccactggaataagtgctggtatccccacctgagagacccatagacagttcacatcacaggactctgtgcagacaacccccaatgccagcccggagccaggtagacttgctgggtggctagaagagagacaacaatcactgcagtttggctcacaggaaaccacatccataggaaaagagggagagtagttcatcaagggaacaccctgtgggacaaaagaatctgaacagcagctttcagccctagaccgtccctctgacagagcctgcacaaatgagaagaaaccagaaaaccaaccctggtaatatggcaaaacaaggctcttcaacaccccagaaaatcacacaagtgcaccagcaatggatccaaaccaagaagaaatccctgatttatctcaaaaagaattcaagaggttagttattcagctaatcagggagggaccagagaaaggcaaagcccaatccaaggaaatccagaaaatgataaaagaagtgaagggagaaatattcatggaaatagatagcttaaagaaaaaaacaatcaaaaattctggaaactttggacacacttttagaaatgtgaaatgctctggaaagtctaagcaatagaattgaacaagtagaagcaagaaattcagagctcaaagacatggtctttaaattaacccaatccaacaaagacaaaggaaaaagaataagaaaatatgaacaaaacctccaggaagtctgggattaagttaaatagccaaacgtaagaataatcggtgtacttgaggaagaagagaattctaaaagcctggaaagcatatttgggggaataatcgagaaaaacttccccggtcttgcaggagacttcaacatccaaatataagaagcacaaagaacacccaggaaattcatcacagaaagatcattgcctaggcacattgtcatcaggttatccaaagttaagacaaaggaaagaatcttaagagctgtgagacagaagcaccaggtaacctataaaggaaaacctatcagattaacagcagatttctcagcagaaaccctcaaagctagaagggattagggacctatcttcagcctcctcaaacaaaacagttatcagccaaaaattttgtatccagtgaaactaagtatcacatatgaaggaaagatacagccattttcagacaaacaaatgctgagagaatttgccaccaccaagctatcactaaaagaactgctaaaaggagctctaaatcttgaaacaaattctggaaatacatcaaaacagaacctctttaaaacataaatcacacagatctataaagcaaaaaaaaaaagttaaaaatcaaaaaaccaaagtacacaggcaacaaagagcatgatgaatgcaacggtacttcacatttcaataataacattgaatattagtggcctaaatgctccacttaaaagatacagaaccgcagaatgtataagaactcaccaaccaactatctgctgccttcaggaaactcacctaacacacaaggactcatataaacttaaagtaaaggggtataaaaggcatttcatgcaaatgacaccaaaagcaaagaggcgttgctattcttgtatcagacaaaacaaactttaaagcagcagtggttaaaatcctaaacatatatgcacgtaacagtggagctcccagatttataaaacaattactaatagacctaagaaatgagataaacagcaacacaataatagtgggagacgtcaatactccactgacagcactagacaggtcatcaagacagaaagtcaacaaagaaacaatggatttaaactataccttggaacaaatggacttaacagatgtatacagaacatttcatccagcaactgcagaatacacattctattcaacagcgcatggaactttctccaagatggaccatatgataggccgtaaaacaagcctcaataaatttaagaaaattgaaattatatcaagcactctctcagaccacagtggaataaaattggacgtcaactccaaaaggaaccttcaaaaccatacaaatacatggaaattaacctgctcctgaatgagcattgggtcaaaaacaaaatcaagatggcaatttaaaaattcttcaaactgaattgacagtaatgacacaacctatcaaaacctctgagatacagcagaggcaatgctgagatgaaagttcatagccctgaatgcctacatcaaaaagtctgaaagaacacaaacaatctaaggtcacaactcaaagaagtagagaaacaagaacaaaccaaacccaaacccagcagaagaaaagcaataaccaagatcagagcagaactaaatgaaattgaaacaaacaaacaatacaaaagataaatgaaacaaaaagctggttctttgaaaagataaataaaattgatagaccattagcaacattaaccaagaaaagaagagagaaaatccaaataacctcactaaggaacaaaataggagatattaaaactgacaccactgaaatacaaaagatcattcaaggctactataaacacctttacacacataaactagaaaacctagaagagatggataaaatcttggaaaaatacaatcctcctggcttaaatctggaagaattagataccttgagcagaccaataacaagcagattaaaatggtaactaaaaagactgaaatggtaactaaaaaattgtcaacaaaaaaaagtccaggaccagatggattcacagcagaattctatcagacattcaaagaattggtaccaatccttttgacactattccacaagacagagaaagaaggaaccctccctaattcatcaccctaataccagaaccaggaaagaacataaccaaaaaaagaaaactacagactgatatcgccgatgcacatagatgctaaaattcttaacaaaatactagctaaccgaatccaacaacatatcgaaaagataatccaccatgatcaagtgggtttcataccaggcatgcagggatgctttaacatatgcaagtcaataaatgtgatatgttacataaacagaattaaaaacaaaaaaatcacatgatcatctcaatagatgcaaaaaatgcattagacaaaatccagcatcgctttttgattaaaactcccagctgggcatactggctcatgcctgtaatgccaacactttgggagactgaggtgggaggatcacctgagattaggagctcaagagcagcctggccaacatggcaaaaccccgtctctactaaaaatacaaaaattagccaggggtggtggcgcgcacctgtagtctcagctacttggggaggctgaggcaggagaatcgcatgaacccaggaggcggaggttgcaatgagccaagatcgcgccactgcactccagcctgggtagcaaggtgagattccatctcaaaaaaaaaaaaaaaaaactcagcaaaatcggcatacaaggtatataccttaatgtaataaaagccttctgtgagaaacccacagccaacatgatactgaatcgggaaaagttgaaagcattccctctgagaactggaacaagacaaggatgcccactgtcaccactcctcttcaacatagtactggaagtcctagccagagcgatcagacaagagaaagaaataaacagtatccaaattagtaaagaggaagtcagactgtcactgtttgctgatgatatgatcgttgaccttgaaaaccctaaggacccccctagaaacctcctagaactgataaaagaattcagcaacgtctccggatacaagaataatgtacagaaatcaataactcttctatacaccaacagcaaccaagcagaaaatgaaatcaagaacttatccccttttacaatacctgcaaaaaatataaaatcaaatgtgtaggaatatacctaagaaaggagtctaaagacctctacaaggaagactacaaaacactgctgagagtgttttgaaagaaatcatagacaacacaaacaaatggaaacacatcccatgctcatggttgggtagaatcaatattgtgaaaatgaccatactgccaaaagcaatctacaaattcaacgcaatccccatcagaataccaccatcattcttcgcagaattagaaaaaaataattctgaaattcatatggaactaaaaaagagcctacatagacaaagcaagactaagcaaaaagaacaaacctggagacatcccattacctgatttcaaactatactgtaaggccatagttaccaaaacagtgtagtaccggtataaaaataggtacatagaccattggaacgtagtagagaacccagaaataaacccagatacttagagccaactgatctttgacaaataaacaaaaacataagatagggaaaggacatttcaacaaatggtgctgggataattgcctggccacacgtaggagaatgaaactggatcctcatccctcaccttatacaaaaatcaactcaagatggattaaggacttaaacctaatacctgaaactatgaaaattctagaggataacattggaaaaaacccttctagacattggcttaggcaaggatttcatgaccaagaacccaaaagcaaatgcaataaaaacaaatataaattgttgggaccttattaaactaaagagcttttgcacagcgaaaggaacagtcagcagagtaaacagacaagagagtcagcagagtaaacagatgacccacagagtgggagaaaatcttctgtacatctgacaaagggctaatatacagaatctacaatgaactcaaacaaatcagtaagaaaaaaaaatcccatccaaaaatgggctaaggacatgaatacacaattctcgaaagaagatatacaaatggccaacaaacatgaaaaaatgctcaacatcactaatgatcagggaactgcaaatcaaaaccaaaatgcaataccacctcactcctgcaagaatggccataatcaaaaaataaaaaaacagtagatgttggcatagatgcggtaaacagggaacacttctacactgctggtgggaatacagccaccatggaaaacagtgtggagattccttaaataactaaaagtagaactaccatttcatccagcagtcccactactgggtatctacccagaggaaaataagtcattatttgaaagatatacttgtacacgcatgtttataacagcacaattcacaactgcaaaattgtggaaccaacccaaatgcccatcaatcaacaagtggataaagaaactgtgatatatacatatcacatatatcatatatatatatcacagtttctttatatatatatatatatatatatatatatatatatatatatatatatacatacatacacacatcagtatgatggaatactatgcagacataaaaaggaatgaattaacagcatttgcagtgacctggatgagattggagagtattattctaagtgatgtaactcaagaatggaaaaccaaacatcgtatgttgtcactggtatgtgggagctaagctatgaggacgcaaaggcataagaatgatacactggactctggggacttggggggaagagtgggaggggggtaagggataaaagactactacaaatatggtgcagtgtatactgcttggatgatgggtgcaccaaaatctcacaaatcaccactaaagaacttattcatgtaaccagataccacctgtaccccaataacttatgaggaaaaaaatagattatgtacaatactgtgccattttatatgagagacctgagaattcatggactttggtatctcagagcaggggataagttttcctggaaccaatcccctgaggatgctgaaagatgactatatgaaataaactcagaagctataaaagcaaaaagttgagaaaatgaacattacttacaaatcaaatattactgcaaaggccttaaacaatatgaagctggaggaaatacaacttatagacaaagggttaatttttctcacagataaagagctcctataattttataagaaaataaaacccaactcattaaaaaaatgggtaaaggatatgaacagaacaattgcagataaaagaaatacaattggttcttgaaacacatgaaaagattctaaatctaatcattataatagaaatgcaaattaaaaatgtaatgagatgttattttttttgacaaggataaaacatttttatgacactgtttgatgagagtatggaaataaagttaaactcattgatgatctcctgcatttcaggtgggagaataaattggtacaacccctatggagagcaatttggctatttcaataaaatgttaaaaggcacatgccttggactcaacaattccacttttaggaatttatcctatatatattcttgcaatgctagaaatgatctctacattaaatactcattgtggtgttgttaaatatcagaaatttattaaatattcatctgttgaggatggattaaataaattacagaatactcttcagacattaataaaaataaagggaactctgtatatactaatgtggactgatctcccaagtagtatttagtcaaaaaaaatcaggttgtaaaatagatatacaactcatagcatacaaaatatgctattttagaaagcatattgtatagaacatttctggaatgatgtatgagatgctagtagtggtggtcatctctacagagaggacttgggtagctagaagatgcgataaggaaaactaattgtcactgtagatccttctgtgcctttgaattttgtattgtgatggaagcatgtgttgtgtacccatattgcctattaaaaaaaaagtagttcaaaaaactaattaaatgagacttcattcttctttgctttgatcaatgaattaactggctggctgatcaggaccagggagtaaacaggacttcctacagagtagagcaactcctagaaatcaagagaacagtgagcttggccttactgctaatgtgaggacgtgctccaagtaccaacaccaaatcagagagagggccacactggctaagggggcatgccctggaactagactgtgtgggtgggagccattgctctgtcactcactgaccttgtaacctcaggcaagttatcctttctttgtgctccagtttctttttcctcacattgcattgatcagcatacctacctctcagactgtgatgagatttgatgagtaaatgtatggtgagaagaaagcgattactgagtgtgtgttagttggcagtggcggaggtggtgaatgtggggtggttcgttgtggcttccgtagtgctttcacacattatctcattttatcctaccaacctctgaatccccagcaaaggcattatggccccatgttttggtaatggtgggcctctggtgcccagagaagttaagtggcttgcccaggcagtgagataattaaactagattttgaacttctgagctccttttctggtgtctctagtgcaccaccatgtccccttgtctgatattggaatcattgcagatgtggcccaaaagattaccctctgtagtatgtgagtgagaatcaggagagattattaataatttaaaatctagatgacacaagggtacagccattggttgtaaagtaaactcaatctattttataaaatccatcagttgatttttttaaaaaagcacttgctaggaaggtatgttttaatgtatctttatataatgtgtagagtactttacaaataatagcatatattacataaaatatataaatattgttgtaaatatgtatatgaaatgtatagtcttattcacgctgtaatatatggttactattggttactataaaaataaaatgcctatccttatcattcttttttttttcttttgtgagacagagtcttgctcttgtcacccaggctggagtgcaatggcatgctcactgcaacctccgcctcccgggttcaagcgattctcctgcctcagcctcccgagtagctgagattacaggtgcccgccactacaccaagctaatttttttttttttttgtatttttagtagagttggggtttcaccatgttggccaggctggtctcgaactcctgaccttgtgatccgcccaccttgtcctcccaaagtgctgggattacaggcgtgagctaccgcacccagcctatccttatcattcttacctcatagggtgttctaaggattaactcagtcagtaacttaaaacaggatttcttaatgtctgcacagttgacattttgggcctgatagttcttgttgtagaggactgtcctgtgcatagtagggtgtttatcagtgtccctggtctctacctactagatacctgcggcagttcactctcctccagttgtgacaactaaaaatatctccagactttaccaaatgtccccttggggccatggagcattactggtttagcaataatagtaagaaattattaggtattattttctgttgaactatacattccatcagaggaggaattgttttttatttgttgccttatcctcggtgactgcaacagtacagggcacaaagtttggtgttcactggctattgattgaatacatgaataaacaattggcatttttgagggcttgctgtgctctgagcactctgctgagcccattatatgcactgtcccacttaaacctcacagcaacactatgagatacatactcttcatgtgtccattttacaagcgagttaatggaggcatggaggttaaaaatcatcatcactggtcatcagagaaatgcaaatcaaaaccacagtgagatatcatctcacaccaattagaatggccatcattaaaaagtcaggaaacaacagatgctggagaggatgcggagaaataggaatgcttttacactgttggtgggagtgtaaactagttcaaccattgtggaagacagtgtggcgattcctcaaggaactagaactagaaataccatttgacccagctatcccattactgggtatatactcaaaggattataaatcatgctactttaaaggcgcatgcacacatatgtttattgcggcactattcacaatagcaaagacttggaaccaacccaaatgtccatcaatgatagactggattaagaaaatgtgacacatatacaccatggaatactatgcagccataaaaaaggatgagttcatgtcctttacagggacatggatgaagctggaaaccatcattctcagcaaactatcataaggacagaaaaccaaacaccacatgttctcactcataggtgggaattgaacaatgagaacacttggacatagggtggggaacatcacacactggggcctgttgtggagttgggggcagagggggaggtatagcattaggagaaatacctaatgtatatgacgagttgatgggtgcagcaaaccaacatgacacatatatacctatgtaacaaacctgcacgttgtgcacatgtaccctagaacttaaaatataataataatagtaataaaagcttgcccaaggccaccaagccaggaagtagcagagccagaacctagatctctgttgctggcagcaaagcctatgcctggcctcactcagcaggtcccctgtaggcaaagtggctcagctatcttttaaaaacagccatggtacaagtgtttagctggcatctgcagttatctataagtgaggtttggcacggtatgtgatacaaaattcacataatttgttactgttttctgcctatacaggataggttttatgggttttggtaaaaaatcttgctgaaaaaagctcactctgaatcttgaggtcctttaaaaaagtaggtgagtcaaaaatgggcagagtgaaaactggtatttatgaaagcaatatttactttaggtttaagttataatttaaccacttctggttcatgaattaaataattaacttttattagttgtccagttgtgtacattgtaattttttttcttttatgatttatttcgaagtcttgcttttagtttcaatttgggagaaagaaacaccagcaatcttacacttaaaaaagagaatgtgaagtttaacttctaatgtgaagcaatttctaaaattaaaaacatgaattaaaacccttttatgcatgtctcgatctcaccgctgttttcttagcaaagcaaagtggtccagtttcttttacccgccttcttctttactatctcttttgaggcatatggcaacatagcgtaatacttggaagaccttttcttttagcaaatgatcatgactcctggaataaaatccaaaatactagagaatatttttttcctatctgattagttggttagcatgtagtcctaatcatgtccccaaactggcctctcctttacaatgtgggaggaaggaagaataaagagtgcatagatttgtatctctcagaaattaaagctatagaatgtgcctcttcccatttctctagacccactccctccctcctgccactagtactattctttttccttaaaatcctgctgggctgtaggcagcatgcaaaggaaaatacagcagaagatgtgagaatgtcaacagataaattgaaaggaaaataacagttctttgactctaagctgagcctgccactcttgctatagcccacattagtggatctaaaaaagccccgtggctctctgtacatgagaattttctgctttgtgtagcttttttcaaaggaattaattcacttcacttttaccagtgttctgaagggagtggtctatacatgccttttagagcttttcctaaaatatgtaaagcatagcactaaatttagccagccgttagaccaagaatgagtcctttgaagggtttctagcttgactgccccctggccatagaatatagaggggatcatagagtttttcctattccagtcctcccattttacagataaggaatttggagtccaagatagtatcattagatacttgaaaaatacagtgtaaggatcctaattagtcctcttcccttctttctaaactacccctctcacttcacatttcgataggacttgaagtcctctttcacattcctttagtgaagacactaaaatactaaaatcatgcttcctgtaactttaaaaaggtagactttacaagccacagcatatttctgaaactggttcctaattctggttccaatgtacttccaacaagtatctgtagttttccttaatctcagaaatcactgagtttagcaggatcctgtaaaggtggccatatcacgttccccctttccctcctagagtgggacacgtcacaggaaaagcgagaaggatctaagacacaggaagcaggagcaacagcagacatcatggttgcttttgagggttggagagaaggcaactaggggaagagggaagggaaacaacgccaatactgggaatcattcactaaaacagatgctcttgtacattactgataacaatggaaccacagtggggaaaacacttatattagaatacatccacataatgcaatattaacgggccaataaaattatggccatgaaaatttataacaacatagaacagcttctgaaaaaagaaactaataatacaaaattagtatgcaaaattatttaggtcacttactctgtgattacgaccacactaaaaggtttgcatgagtcaaaagactagaaggaaatgttagaacaccaaagatggtttgctagtgaagtaacattatgactgcatttttttcttatctcctttctagtttattaataatatgagcatattttatgaaatttaaagaaaaaagctcataattttgaactaaaaagagaagcattaacactaacagtgttagtaagcagaagagataaagacacacagatggccaaaggagttatccctgaacaggaaggaggaaaaaagattttttaaaaaagccatcagtaagttacctgctgtgcaatacttttaaaaactgaaatgtagaagtgagcagaaaacaaaagacccagagaccaaagaattaaagaatcatgactgccacaccaaacccagagagagatctttttacttgaagaaaattggctttacctgccagcaacttgttacaactagttggcatggtcacctgcaaaactcacagtgtgggtctggtgagagaaattacaggatcaacaccagcaagagaataggtttaatatctgaaatccaataagagaaacaatttttatgtctttaaagggtctcccaaggcaggatatgcagtagttgtagaagtttagaaagcccaagtgtattgagttttataaaagagatactattcctcagattttttttctttccattctccttgcttatagacaataagaatttcaatgggacttttgaacagtaaagttgggaaagaataaatttttataagtcagtgaaagtgtggtttttgcatcttcacatataaattaagccatattaattgtcatagtaatataactgttgaattaaacaactggtgtttttacactgcagaatttcatggaggaaattcaggattggctctaaagcagatagaatttaaaagaatttgctgtatctcttttaaagactttttttcttttaaattttaactcttgtgattataatttgcgctcaatatatacatctaatttttgttagtttccttcaaaactctcattaaattggtgtcttattttgtgaatgatgacatcttagaacagaagcagtgcaggcattgaatgccaatgttcatccctccccagaaatacatgcagttttatgaactcactcatgccttgctgagcttacccaaggagtctgcttttcttatgtctttttaaatataaaattcagggatgttggaaaaattgggtatacagataccctctgttgctttcagttttcctttacctttttcactgcagtctgtcctggtagattgtcattctagccttccttaaagggcctgagagcttagcatttcagactttttgggcataggaaatcttgtcatttgtcctcggtggtctcaagagacctataatccgaactgtcctttctctttccaagtagcatcctcaatacacagttctctttgggccaggacccccagcaacctcccagtttcacacactcactgatattttctgtaatacacaactgctaactctgttaaaatcgttttgtggtttttgttcatgacacctcacattgttacattatttcaggtcactgcagataatggagttttattacagtattaataattgcacagtctttgtgaactgctggaatatcactcaggatataagaggctttcaatttctaggactttctctttgttttgttttgttgtttttttttgtttttttttttttttacctgcttctttctgctattttcactctacctctctttgtcctaacatgttgcttttgcatcctcgtggttttcagtacaggtttctacttaatatattctctctgcctatctctcagtgtcattgacacctgagtgtcctgcattcaaaattcccaagaggagggtccagattaactggtcagtcaccacccagaacagggcttccgattgggctgagagaatatagacaatgtctgcctttgaccccttgccctttcctcacccaggctggtatggtcagatcacagggccctttggtagaaagcgggagaaccttttgagaaacattttgacccaatttttcagaaaggaactgtgactgtaacaatcagagtataataaacacatctctactacaaacccataacagttacaggcatctgctaattgcagaacatccttgaaatcgtggcaaaattttcaatatcctaatttttatttacgtattttatgttatccatacatttaaaagtgaaaaaaaatcagttttcaataagcagattatcaaagcgaaatattagcttcatgcttcttggaacagaactactgaaggcttttttccagacagagtctcactctgttgcccaggctggagtgaggtggcgcattctcagctcactgaaacctccgcctcccgggttcaagtgattctcatacctcagcttaccaactagctggtattacaggcgtgctccgccacacccagctaatttttagtagagatgagggtttcaccatgtttgccagactggtgtctaactcctggcctcaagggattcccccgccttggcctctcaaagtgctaggattacaggcgtgagccactgcgcccagccctgaaggctttattttggagtcgaaaacgttttacttatgcctactttgaaaacacacgaaccaaaacaagacagaaaagcataaatgaagcatatctcggaagctttaaaaaattactaattaatgtgtaaggtggacattctcttgtagaacattatctctataactaaattgttctctgttactaaatgccagcactgaccccaggccccaagactgaggataagttctggggtgagggatgagatgagggatatggagatattaggaaagggaggacagaccacttacaaccaagcatcataggttaatacactcagtcatctcagaaagggatgatcagccatcctaggtaaagtatctgcttgctccctgagaattgactggtgtcatccgcctcagacttttctcaaagttgtaaacattgcattcacttactttctgtgaataggtgtgtccactgaggaatataacttaatgtttttttatttgcaaatctagtggctaatgatctgattattgttggctttctgaacagacatcctattttccccattttcacactgaattatgttattgtgaagatggagaagctgtttatgttacaataaagtcctctgttctcagctctagaatgtaccgaaaaccattcagctaactttccttcagctaacagtccttcagtcttagtagtaaatgtatgatattcaatatcattagtatcttttcagatgatgatttttctggacagataatataccttaaaaggcactaacccaattctaacatattttaaaactattgatttgtcaaattataaaatgcgtactcattaccatgattaataaaggagagtaaaagttatttgtaataaattgcaataaagatggagtaagagtcaagtgtttgctgagcacttcatttgctgcttaaaaaatgatgatttacagtttgacagagaggttcttaaaagccgagttagtagagctaataaaaatggcttcactagaatgtgctgcttcattattttgaaaagaatacttaactacaatatgaaggcagtttctgatttaggtcatgaaaataagaaactccaaaatgtaattgttcttcttccttcagcgtactaatgtgaaatattttaaatgggaatgaaaataagcgtatattgttatcatataattatttttcatattaagattaatttgtatagggggatcacagtgtttaaaaagtgtatctctgatgaatccattcatttattcagcaaaaacccatcacatgcctctgacatgccaggcatcccatgcaatgctgtgatggtgataataagaaggtaggcgctggccttgctctttctaggagctaatctttaaaatgaagaaatttattatagatctgataagcactggaaatttagcaaagagactcaaagagtgccttcagtgttgataatggcccaaatccccagagttctttctctttgcttcaaagtgatatctgtaactccttgacttctatctactgggaaaaggtagaggcatctcaggatggcttcatgtgactgtgtccctcactacattggtgggttcatcccagatgctccctttgtacatctgtcccatcaaatggccctgtgctatctactgatgcttgcatgggtgctgtctggaaagagcagctctgcctccagcagtcttgcagaaaacccactcaccttcctacctgcagaccacctcagttataatttcaacatctacagtagacagagttgctccctgaactcagaatatgaaaatcggcccctcaaattcttaccaaaaaaatgaacccagttttactgtaaaggtttctagctcttgtaaaagatactaggaaatgcctgggaggcaggctaagagtagggtaacctctttctagcagctgactttctttcatctcccttcagctctggaaccaccttgacacattactgtttccccccagaaactctttgcatctgatggtcagcaactgctagagaagctgggaggcaagctttatgaacaatttaaaatttttatttttagtttattttagagatggaatcttgctgtcgcttaggctgtagtgcagtggtgcagtcttagctcctgggctcaagtgatcctcccgcctcagcctcccgagtagctgggactacaggcacatgcctggctaaaaaaatttttttaaattctttcagatttctttcaattcagttttcttactctagcagtcttcaaatcaagccattcttaattctaaaattagactaattcacaagtaaaaattcaaactgtttcatctttatttacataggaaggcataaaatatactacagtagaaaaatagaaaaataagaaatgaaagacatgttggaaacattttcatatgttaattagatatataatgcatgcatataaatatatatttttaaagcaaaaacttaaatttcatggcattaaaaacacttttctatcctatatatactcatatttttagataaagttgagtcagattagaaattttaagccaaattcaaaagcttttgtggaagaatgatgggacgtctaggctgtaagtaagccatcctgttgaacagttctcactgcagctcagaatcatctgtcaagtcttttaaacagactcacccttgccctcctcctagagattctcacacagtaaatctgaatggagcacgggcatccttccttttctaggtctctgttgtgcaccagttcaccagggctaggaaccgctgctccaagggttgctgacattggcagcattcttcttaggataagaaggtcctttcattggtttttttaaccggcctttagttgtttttttgtgtgtgttttgttttgttttttgatttagtgttattttatgttttttgaggaaatcactgatcagcattctgtaactatttcttcattgggagaagtccctgaatacgatgtttcaagttaatgtatttgcattttccttgccaaccctaacatagccttacaaagggactactgactttaccagttttgtagtctactgactttaccagttttgtatctcactagtaacttttaaatatatttgataagctgtacatttaaatgctacagacatttggagtagagcacttaaaacgtgaagattaaggtaggtccgatatcgttggagaggacaagcactgaaacagtgaccctacttcctggtattgggaagtcaagagtggggaacagtcttaggatgaaaaccgaggaggagaaggagggaccctggcatggcttgtgattcattaagagagaggaaaccaacctggaaatgctaccctaagtgctacttcacttccactcatctgccccacctcagaccctggacgcatgtagacatttataccccctggggagacgcagagcaaagggaactggggttatgccttgccccctacatgctccatgccccaggctcccgccatggttgcctttgctcgtgctggtcatcagtacagtcagacagaaatgtctgtgcatagctagtgtcttcaggcccccaagtagatgtgttcaccattctgtttgttcttcagaggaaataccctctggaaccacctcgttgtcactccatagaggtgatttgggtcatgccattgaacttttttagataatacctgagcgatgatgctattgttggttttccaggtgttttatgggtgaagaaaagtcctcatctgacttctgagtattatataagagattcgattaaaatactctagagttgaaaaacagatccagaacaaaggggaaatttttaaagggttgactttatttgctttatttactctgagactcactaactgtcccattcccaggcaggctttcatatccattagctctgtttttgtcaaatcatttgacttatttttttaataaacaaaatctgaagcttccattaggttgcttgaaattcaaaacgaatgggattctatgactgaacataaagcagtgaacacaatgctagtttgttttcaacccagaaacacacacacccatttttgtctttgccttcttcctcaccccttgaaaggttctgagccactcccatgaatcttcttatgctagggatcctaatacctgcctccccagccctctccacacagtcgggggctcctcccgcccacgctccttcgcttcagtgctgaagcagtttctgctgtgtcagcactgctggtttgagtaacagggccctctttgtcagctacaacaagggcctctcatttgtgccagacacataggaggaccaagaaggaagccccctggattcctgtgggaattagtttactattgctgctgtaacaaatttaccataagcttattggcttaaaacaacacaagtttattatctcacagttctgcaggtcagaagtccaaaatgagtcagcctgggctaaactcaatgtgtcaacagactgtgttccttagaggaggctctatgagagaattcacttgcttaccctttccagtgtctggaggctgcccacattctttggctcgtggccccttctatcttcaaagccagattaaaggcatcacttacacccctgcttccatcatcacatctccctttctcctggtcctgcctccatctttccccaataaggagccttatgattacatggcacacacccagacaattcaggataagttccctatcttccaatccttgatttaatcttcagagttccttttgccatgtaaggtgacacattcacagatcccagggattgggaggtgaagtcttcgttattcttcccaccatactatgtaatgacctatgtccaacaaaaacatgttgccactctgtcacccacctcattcccctctctgtccttactccctgacaccatccctcccttccaagaagtctctctgtattcttgctagtttgtgcctttgtcaacacagttctgagatggcccctacatattcccccgctgtgctaataaatctctgtaatcaactcatcacctccaggttaagtgtactcctcagagatcaacctttacacagtggggaaagctttcattcccttttagacagttttgcaatgttatatatgtttataatttgttaagacttttcctataaagcttttaatgacttccttagatggagttgattagtaccttctctgtgcttccagagcctttattatagcactcatcacattttattataattatttgtttataggttatttcttgccaaatagtctgaacttacaagaacagaattgtccttttgtctttctcttcagagcacttagcacagtagatgcttaataaatgcttattgaatgaatgaatgaataaacaaacatgccattaaaccttgcctgtttggccaaaaaataataatcacgacaaggtttggctctacagttattaaagacacaaaagatttcattataaaactagtcctataacagagtccaaacgatggtattttaacaaagttttagtgtaatattattttttccatccctgcaccaggacaatgcagtttccaaaaaacacgtaagtcttgatccttattgttgacttacatagcatagtttggcaacttcttaaatgataatatactgcaggaaaggcttatatctcttcagtccttggcgaggaattctaagtactgtttgaacttcttgattatgcttacttaactaaaatttttgtcaccagaatggaagacaatggggtgttgggatagctgttgctgctgttaaggcaggaatttcaatcctggtttgatggtttgtagtgaactttgaacctcattaggtttaaggtaaaagaaaattaggatgagttgacttacagtaaaggagggacaaataagcccccgagacaaatgtaaaaacacaaagaataagaggtaatagaaagaaaagaaaaccaagaatgaagcaaacccgacacgagtaggttaagatgaaaggtttagttgaggagcttagtgcagtaaactcccagggattatcaactaaattattattggattccatagtttctagaatacatgtaatccaaggtcagagtcaggaatctgtactgatttcaggtgggaggaacacctgtcttcccaggaacttcaagattgacaggaagcctcagcccttgtctgggtggccacttgagtagagtggaaataagcagtgctgtgtttaagaccgtgaacacaaagacagtggtgtagctccacctctgggaaatagagaagccttccagctgaaaaaagagagcattatcaggcaggacctataaggcagcaatactgggtccctgacctgttaggaactgggccgcacagcaggaggtgagtgatgggcaagtgccgccttctgtcagatcagcagccacattagattctcataggagcacgaaccctattgtgaactgcacattcaagggatctgggttgtgcatttcttatgagaatataatgcccgatgatctgaggtggaacagtttcatcccaaaaccatcctccccatcgctgtccaaggaaaaaatgtcctccacaaaaccagtccctggtgcccaaaaggttgggaaccactgctataaggcattcatccctgataaaaatgtgtgcctagataactggggagtgtgaagctgcactcgtgattgaagtaactctgtagagctcatacctggaaattccttcacattgcagtcatgtttaattgtgcacttaaattggcatggaatagggaaagaggtgcaactttcaaagatgagacatagaccataaacctaggggtgtggacctttttacctccaggtggtgtcagcaggaagtcgacgcttggggaccagtagcagcaacacagctgaaggaagtgtgcatttaggggaagccctgttctgtcacaggaacaaatattctttttaacggatggctagtaaggaagcctgttgtggaaatcccagtttgaattttgatttgagtgtgaatgttgagatcaaccagtcattactcatttttttatgagtgtaataacattcaggatatgtgcttgtcagtcagtacatacaccctttgggtgtggcagggtacttggccatgtcttgtgataataaacctgatattatgattacactaaactttggatatttctctagtggactgtgtacttgtgcttgtgtttcttgtaaattatgtttgtagattaaaagtgtggccctactactaagactttggcgtctaggaaactaaatgtaagttttaaataaacatatttaaaacatattccaatctcttacaatacccatgacatatttatggaatatttttatagaattcacccatctataaagcatgggggtaggaagtgaatgctccatcgaaggggagtggccagtccaggtcgagctgtttgttgccatgccaaagggagtggccagtttcaggcctaggcctatttgttgcaggtattgccagattcaaaaaaaattttttttcaagcagtgtcagaagtgcaaatgtttgtgtgaaatatgctaaattttgaaagatgaaaatgaatttttttattatgctgagttcacttttgagtttatgacttctgttattaaggaaactaactttaggagcataatgaattagcatgcttcttatttcagttttcatttgattgttttttatatacccaagatatttcatgatctttctagttcactattcttgctttaacaacttccttagtatagaccagtgaatctcaaccaggggtgattttacccctggaagggacatttggcaaagtctggaaatattttttattgtcacaattggaggttggggattgctactggcatcttttgggtagagggccaggaatgctgctaacactgtacaatacacaggaccatttctacacaaagaattatccaccccaaaatgtcaatgaagttgagaaaccatggtgtagaccgaatttttaatatctgtcctttccctccctccctctcttccttcctgttaacaaataatcttttctcagtttctctctttctcctgctttctgtaatctcattcagaacctttaggttgatagttctcaattctaaagtgcaggaaaaatcacatgggaagtttgttaaaaatgaagactcccagcctccacttgtagatactctgccatgtgtactttgggcagcccaagattctgcatcttgagtaagccctgaggcgattataaggaagatcacccattgaccagagtttgagaagaaatatgatcatctctgttttcatagtctttggctttatgtgtttcatcattgtttagatcttttatcatttgaatttctcagttatatcccattacttttattaagcccttaaaatagccatagcttttagtagttatttacactttgggaagtaagtaaattaaagcatagttgaggataaagagatgaatatatatatatttatatacatgattttatatatatataaaaaatcataaatcatatttgatccttatgagttgttgaagtagctacatagtatatcttacagggttcctttcccaaatttctaatttcttttctcagtcttttttgtaatatatcatatgtgtttctcagaagaagttgtttgagaggagctccctgcaaatacaagattaaaattttgtttagctttttaagcataggaaccaagtgagaaaaaaaaagtgtggactataacagctgataatattgagaataatttatgtaagtgatttcttaaccatactgatgttaatgttatgaaagattaactttccagagagatgagtttaggccatgtacagtgaaggcaatatggtcatcgtagatctattcatccagatgctgcttggtacttagaaaaaactgatgtttatgccaccgtagtgacctgccttcaggggcttcaacttgtatctaacattcacatgttatggtatattgatttcaattcacagggctttgatagtcaggtcaacaacaattctttagtgtcttcttgaaatttacagttagagtgatgcatggtaattattgggtactttatgaaggcatatttttggtacgtgattactaaacataggcacattacaaacataggcacatcccacacaggtaagacaactcactggctatctgctaaggagctggccaccaagagtcatggataactttgtcatctaactttgtagcttctcacggtaattctgaagaaactattttgtaaaaagctgaaattccatttggatggttttgtgtttatgccaaattaaacagatattacagtggttgttggatggccttgggagaggtttttagccttcccctcataattttcaccaaatgccttccaacctatcctaaataaatatcaataaatgtcttatgaagcaaatgtgttttcacacatttctctaagtccctcctacataacagttctggtgctgacaccgctaacaggccactgaacttgaaatggtgagtctccgtgtacatgccacctctatcagctggaaccctggcaagccagttcatctttctggaactttatttcctctcatctaaaatagattaaattgggtgtttcgtgaggtcctttctgggtctagaaggctctcattctcttagagtgcttgcaatttgggtactaaaaccttgaattgatgatgggcatttggggcagggggagattagtctttctgtgcatcacttgccccttccataaggaagagagggtcaaggtcaaacacactttccatcattcaacccacaaaaaggagcccatgctgctgtggctcatttaatgatgtttattgggccctaagattaagtatatagactgcctctttcctggagtctatttctggagtatggttctatgaagctaaaggcctcttttctttttggcttctccctgtttcctctctcttcagactctctcaaggttagaagtggcaggaccgcctgcttgtttgctgcccagccagagaaaacagcattaggtccccctggccacagggctgtcaggtcctctgctcctgtacttggctttgcttcttggagattgcttgacttacttttgttatcagcgtgatgctgggttgagccttgcctggaattgttttctaggtagactagcctagttcattggggtttggggtgaaacccaacatcctctctttccatttcgcttaacagtgttattagaaaatggtggctgtggttatcacatcaagaaaagtaacctggtatagagggtcagcaaagcatttacttattggtttatttgctctttctttcccttggttcagtaagcacttatttagtgcctactgtgtgccatgcaataaaatacttagataagttctaagcgtaatacttcagaaactgaacaaacgagttgagtatagagtatatcatgttgggcatggccttatgatctttatcctctatgatcatatctgtgaagggagaatatctgactataaaagagaatgtctaatcttaactgtgggtccgaaaaaaatcactaaaggctaaaaatgctctaaagggaagattatataggcttttgttagccccatttaaatttgggggttgaaattattatgagggttaaaaagagagttttacatagtacatgacttagaaccacatcacccattttaaaatcatagcacaaggttggccttattctaagtcagcagtgaagagctgacttgaatcctagtcaagagcttcactggagtgacagccatgggccaccttgtgacccaggagcggcttgtccttacactaacaaagccatcagtgaaatcatttgttgaagatccatcattgtttggacctaggaatataagtgtgaaaatcaccacatgcagcagactttgttttaaatgaagggaaacctaccattagaacataagcagaatagtaacaaggaagtggcaaacaatttgagagaagaaacgaaaactgttttgtttaatttctgtactatcaatgtgatgttactttaaaaattaatagcaatttaaatgtgaattgcagcccccagtctccccccaaaaaaactttcagaaatgacccagctgcccttcctgaactacccccattaaaatttccggaagtcctcccaggacgggtccttcacagctttgatggataacggctgactgtttctatccaagtctattgttcaatctcgtatgaatggaaaatacagattataaggaatcatgaaaaataaaaaacctttaacgttaaactttccccaaaagcttattttcagtgagttggtatcttacatattaagaactttcttaaatcctctcttggacccttttcctttagggtggtagggtatgactaaatgatagaaatatgaagaatacttttgaaactaaaatgggaagcacattcttttaaagaggcatttgttcagccagctgtgcagaattagatttcgagagagccaccaaagctctggaatttacactgcggcagaataccaaatgaaaaaacagaagttagtcctgtaaacagagctgggcagggcagggcaggcctgtgtgtctgcccccattctggccactctggcgtggccctgcccaccaccaggtcctcggcagtgccctgagacctgacggcacaagacatcatcaaagtgcctcaagatgctgcaataccaaccctgtgtgcagagactagctggaatccaaacaggagaagcaactgcaagataatcacttattcaaaaaaggcgattttgtttggctctgctttatctgggagtttccagaccaattcagtctgtatcctgaagagatcccagcctagaaaaataacttttttttgaagtacatgcatcattggctactattaattcttaatttagactagttttgataatgtcagtggaataaaatgtggagtaatatttaaatgcataaaagcaataactattaaggtttgctttctctttcctcgggcctatttaattttgccctccaacttgcatggcatcctgttaactcattaatatgtacttactatgcttttccttttttatgttagtactagcttctgacttgaagattgtttaaaaattctgcttagcttcttttgtcttgcatttgtaaaatgttcttaataatagagtgaagatactcagaaatacagactgttaaaacaattgtgaaaaatatttttgtatcaattcacaggattattattttgtttggttatctggctcatcatttctttttcttactaagcaattttaatagtttttaatggttcagttataatcgcagcattagtattcttgagtaaaacacagttttcttttcatataaataatgtaaaggattacttatgatttgattataattaaggtagtttttgataatatatgttaagtaatagttctttaagaaataattaaaattataatgatgtagtcataagtaatttatttcacagaaagactgttgaactaagagggaagaaatattttgaagaaaattaatagtggagataaaactctttcctggtgtatatatttttttattcctcattaaaagtttttatttcttagtacacaaattacactaatcataaaaaaaaattctgaaattaaatttaggcaacttccttagctgtcttagaagtcttgggtacttccaagtcactgggtataatcaagggaccaagatgtggaaaccactgcactaaagtagcaacaaatgtttagagggagaacagaataattgaaacagccctaaaaagtgatgtgcaagcaaatgtacatgtattatagtttaaatattctttaagtgcttattcaaggaatctttggcttaaatttttgttttttaaaaaactattacttagtgtaactgttcccctcatctatctgtttggtaagctcttatttttgtgtatcatatttgcttgatgtggaccctgcttgagttgacttgacagtttgaggaggtatgcacagggcccttcctggcacatttctaccactgtaggttccagcgtttaactagttattttcagcccaagcctagtgaagatcatgctagaacttgggaaggcctagtaaactaagctgggtgctgcagtccatttccaggtcactgccttttgtctctttctcataacttattcacccctgtgaccttgttagaacagtaatgtttcttcataaaacattcttaatgagtctatttaccttgcatgcccaatgagatcgtgtttcatgtaataaattctctactgagacatatgccaagaaggcagcccttgaagctgttaaagaattaactttttaactgagggaggggccatttgctgtgtgactacagctatcatagtgctatttttcttattttaaatgtattataaaactacttagaggttttcttttttgcttgtttgttttacacatgcacatacatcagtcttcagcatagttatcctcaaagaataagaatttacaaagcagatactctattttctaaagaatgtaaatttgatttagatatttacatctaaataatgatatatttgtctgaagaagttaccagttgcaatggagctcaggaactttatttttaataaaagaagtagtagggtctttccttagtaagttctatttttttatacagactgactagattgatttctatctagtcagataaaattgttaaattctcctccagttagaatcaaggtgtcacaacagggagcaaaagcaaaaagcctgaactgtctgtaacagtaaaataaccttccagtgtaaagaagttgactgtgctgcccagggagttagaaatgaaagcaacttgtgtattgatacaggttgttacaagcctcctatttaaaagactaatctctgtcaacagaggtgatccagtggtgaccttatagataatttagaaaagccattttagctgtcgatcctcttctcaccccctttgaccttctgattagatgtcattagatgttgtctgcaaatgtaatgggacttctctattgtagtttttcatgtcattacaataagtcacttccctctaatgctacttatagttattgcataagtcactttacccctctgtacatggtgataacacagtacctacctcatagtgtgcttatgaagacattgaatgggatatttctaaaaactgttatcttagtacctgacatatagattctccattaatgtagctctttactattttctccactaataaaataatgtaatctcaagattacaagaaaccaaagagtgttttttacatacaggactgagcaaacagcttgctttataatggtaaaactactttcaaaaaaaggagggtgggggtgggatagagcggagaagagagcacagaggacgttaggtgtttggttttttcccatggtgctagacattctctcaagcaggcattctgagatcacagtctgccctttgtgcatattttggaaacgtatttctgaaattatcttttaccacacatataaatataagggatttattcctgtttttcagaaaagtatgagccagagagatttctttcagacaaatgttaagtcaggaatgtacatcagagggtcttatttacttgcattgtagggccaccagatctcaataactcatttcatcactttcttctaccttagggcagaactgccctcaggcaagcaggatgcctgcttacctattatcttagaatttttagaaaagaatagtacatgttcttgctagtagtacattccaagctttctccataacacattccagaatgctgggaggaaattctcctaatgtctaatctaaatcccttcttctgccctttaaacccttcgtatcttatcttgacctcagtggaaatagaaaatagatgctccccatgatttagccaatgtctctttaagtttttgaaactgttattgggcttctcatagacctcatcctctactctggaataagtcaaccgcagtcttttctacctttttttctttcagaagcatgttttgtcctgagggtaaaacatgtgggtagaggatttgtcattttgttactcccttctgatactcctcaaggtctatatcagcacaacagtgacagggcccaagtaggagttgtcaggcgtaatcaatccactgtccacccaccctggcagggaggcacgagccacctctctgcctcaccactgctgcagctcttcctaagagatgccggagggcacttcagaattacagggcagcctcagccccatgcgacgcagtccagcagtggcctatcttgttttcattcaaaaccagccaggccttgagcacaagaaagctccagaagctttctccattgcccagagatgattaccagaagctatttaaatctctgatgttctgagtttcctcttcccctgaggttctttctcagtctagtgaggtccccagcctggccagacctcgaagacatgttgtctcaccttgaaaaccccttctgtgtgcacacattcctgagtttgattggcattaaaaaggggaggggggatgaaaaatgtacatattagaggagaaaaaaagaatatagctacagaaaatacaaatgccatgaaagtaatcatgctcaccatctgtctagccccagaagaacctcagaagcatcttcccagctttgtccctatctgacttcctgtctgtctccagtggtatatttctgttgtggggaatcatcttccagaaatttgttattgtctctgtaaaatcagagaacccctattctgactccctcagattcccttgagcccctctgcccagttctggcttctggcctaagggactttcctcttaggtgggtcaatggcacttgactccaggtggattcccatacagcaaagtgtcctggtcctcataggccttaggtgtaatctgcctcacaccaaaagcaaaccagggcttggtggaaattaccacagaggggacaggatagtgtgcgctcccatggagagagaaaacaacttctctctgccattgtctttctctccaaatatattgtaaatgccagtgacccaaaacttatcatagccagctttataaacctaattactttattatatatcgattcaacttccctaagattgtaatctcttatcagggctcagatcttgttagtcagcattacattgctcacaaactgggtacttcttatacaatgggtggatattagttatttgctaagtaataaacatataacaattgcaacaaatttatatttattatagatatagatgcaggtatctgtggatagctttacacacacattaaaatgtaatatatgaggccaaggcagacggattacctgaggtaaggagttcaagaccagcctggccaaacatggtaaaaccccgcctctactaaaaatatttaaaaaaaattagccaggtgtgctggtgggcacctgtaatcccatctacttgggaggctgaggcaggagaattgcttgaacccaggagacggaggttgcagtgagccgatacggtgacactgcactccaccctgggcaacagagtgagactccatctcaaaaaaaaaaaagtgtaatatatgggtactcactcatttggaatatcttttaaagtgatcagaggttgggtttgtgtttgccttagcatgttttctatatcaacaaaatcaataatgtgtgttaacttattaaattatgtagattaatctgagaatatttgaagacactttttaaaaaacaacctgtattcaactttcttaaccactctgagtatttataaacaattgaaatgctacttccttataatcaattgacaagctaattatttattgccctgggacccagttctactggtgtttattgcattgggattgatttagatgatctttttcctattagtgcaaattagttcttaaccctatagaaggatgacattgcttcctttggtttcatggccagattacttagttgccccctatctttgagagtactccttctctggcagtcaaaaggcaaagagaagtcatgcagataaagagatgaggaaagaacaattagggttattgggctgaaattcgtgccccatgtatgagggtgacgggagaaatggtctgttaaagaagatagttggtggtgggggcaaggggaagagaatgctgttactgttttgtgggcagtaattacatttggcctatgaacagaaaatatatatattttaatataacctcaatataacctctctaatgtttactgccaagacctaaaatttcgagacatggcatgaagcatttctgcaatcacagaattctcactttatttttttctaatgaaatattgtaattgaacaagattccatattctactatatatcactcttttactatactccagagggggaaagttgtcctgattaccatttctaagactaaagaatctttacgtggtgaaagtcctagtcagccatcattcggccacaacagtggcttgtcaaaagggtatgtagcaggtcataccagcctcaggagggtagagcaaagcaaaaaaaggaaatcttgccatgtcatgtttcaaagctcttgtgaatcttgagatctcattagaaatctgtcacagttttaatagagtcccaccaagatgtgctctgcctgctcttttgcaggttggtcaggataggaagcagggcctccccagtgccagttcctcggggaacaattcacgagaatctaaggagttgtctcccagcagtgccaggaaagagtggctgccaaaatgttactagtaattaaggactaggcacctgagggcagcaactaagcacatactagttattataacatccaggtagaacaaatgaaactcctcttttaagtgagtttaattgggactgggagacatttacagtcacattaatgtaccctgcacgtgcacacacacagatacacacacagctactgttgctggcaatggagaaaatgctgtttgggtctggccacctgggaacatgagatcacaaagctcaatggccataaactcaatattgatttagtaaggtgctaaatagtggtaagctcccaaatgtatgttcactgatgcttttggttaatagaaacatgttccttaagtatcttcagccagcaatgttcctgtgtaattagcaaacatcttaattacacacttggatttgaagcttatgctagctaatcttaaagtataaaaattgtacaaattagataaagagaaaaggtttagaagagagactgcgtgtagcatagaggttaagggcgtgaactctgagccctagctggattcaaatcctcaccctggtatttactagctctgcaatatgaaaaagtagttattctttctgtgtttcagttttttcacctgaaaaatgaaaatagtgcctatcatagggtcatggtgagcattggaatgctgaaaacaagtaaaagctcttttgaactgtgcttggaacatgaaatgccaaatacatttagcttattttagatacggtattttaagagtaataactccacaagtgggtcattacacagtagaaattttgaaaaggaataataattaacaattcagaaattttatcataaaatctcagaagcttgcccacatttcccacagggaagtaaactaatactttatatatgtaatagtttgttaacgtttattaaaatttttaaataaggtcaatttattcaacagatatttttattgagtacccataagcatcatgggaagtgatatgatgttatagagatacataagacattattacccactttgaagagcttaaattttacaatatagcatgttttagaacagtataaaatattcaagcattttagaaacattactttgatataaatataatgaattaagtaaccgtatttttggcccttttagaaaagatattgggtaaatacgcatggctgaagatacactggagatatttattaccttgaactattggagtaaatatgcattattactcaattccaagtgtcctacatatattcacaaaatcacagtataaagttaaatgtacctgaaatgctaaatgtgatgtcgataatcagctccctaggtttatgctacagaccacagccttgtgtgtaagtgctggagaaaatattaagtattcttcatgacatttcctatcattgaccttaaatcagctgtgagaataagcacagcattgtagactgaaagcctaaagcaatatgaattttatcattagtttgcaaaaaaagtcacttttaataaaatttgaaaatatcaccattggctgttctagtcaataaatcatggttatcgtcagatgtggtcctataaaggatgagaacatcttaatgtgctggaatatttttaatgcttacaaaattatgggggaagaatggaagtgacattgacatgttatttcagatgttaataataatttccaacatgtttttatttgtcatacccatttagttctctgagagataagagagggagacattgtcatgcccatttttcaaatgaatcagttgagacttagaggagagtttatctaattgcccaaaagacaaattaatgctattgagtattttcttaagctctgatagagtcgtcagttgacgaggtttttagattacctgggtgctttgttcttttctgttttgtctagtttttgaggcactttgctgagtatttttcatttgttcactcatccattcatcggaagtatctgggttactagtgccggctcagcactcctgggcagttcttggtcagcatcttccattaacatacgtgaatatgatacatctgcttttccttgataaacagttctaaaaatcagatttctgtgcctcaaatcttttattaaagagatagtctataaattaattattgaagtttaaaaattttgttaatattaaacttcttaaagccagtagttatgtcttattcatcttttaagcctggttccaatatttaatatagcttttgttgtttgatagcttatcttttatctgaattgtaagattttctgtgatgaacgtgataaacattaatggctataattataaacacaaattactcttatttttaaatcaagttaattggtgtaacatagtcctactctacgttaaatttgtgtcctgtaagttctcatgactgttaggattaagtagaaggtgtctgtttgcttcaagaatttttaaataaattgaaatgttacatttgtaacgtaagtaattctcacatacctaagctcagtttggtgcttcttaactttttttttaattgttctctcattcatctgtcttcccaattatatatccatctacccatctacctcccaaccttcccacctcccccactacctccatcatattcgcatatgaagtaatttacccttcctctaaactctatttcagatacacaagatgtgtgatcttatatttcttaaactttctggtctctgtttccttattctacgatgagaatcataatagaatctactcataaaattattaaattagttaatttatatagagcatttagaacagtgcctggcattagtaagcattcaataaattttagccatttttggggtttttttaattatactttaagttttagggtacatgtgcacaatgtgcaggttagttacatatgtatacatgtgccatgatggtgtgctgcacccattaactcgtcatttagcattaggtatatctcctaatgctatccctcccccctccccccaccccacaacagtccccagagtgtgatgttccccttcctgtgtccatgtgttctcattgttcagtccccatctatgagtgagaacctgcggtgtttggttttttgtccttgtgatagtttactgagaatgatgatttccaatttcatccatgtccctgtaaaggacatgaactcatccttttttatggctgcatagtattccatggtgtatatgtgccacattttcttaattcagtctatcattgttggacatttgggttggttccaagtctttgctattgtgaatagtgccgcaataaacatacgtgtgcatgtgtctttatcacagcgtgatttatagtcctttggatatatacccagtaatgggatggctgggtcaaatggtatttccagttctagatccctgaggaaacgccacactgacttccacaatggttgaactagtttacagtcccaccaacagtgtaaaagtgttcctatttctccacatcctctccagcacctgttgtttcctgactttttaatgattgccattctaactggtgtgagatggtgtctcattgtggttttgatttgcatttctctgatggccagtgatgatgagcattttttcttgtgtcttttggctgcataaatgtcttcttttgagaagtgtctgttcatatcctttgcataaatgtcttcttttgagaagtgtctgttcatatcctttgcccactttttgatggggttgtttgtttttttcttgtaaatttgtttgagttcattgtagattctggatattagccctttgtcagatgagtaggttgcaaaaattttctcccattttgtaggttgcctgttcactctgatggtagtatcttttgctgtgcagaagctcttcagtttaattagatcccatttgtcaattttggcttttgtggccattgcttttggtgttttagacatgaagtccttgcccatgcctatgtcctgaatggtaatgcctaggttttcttctagggtttttatggttttaggtctaacgtttaagtctttaatcaatcttgaattaatttttgtataaggtgtaaggaagggatccagtttcagctttctacatatggctagccagttttcccagcaccagttattaaatagggaatcctttccccattgcttgttttcctcgggtttgtcaaagatcagatagttgtcgatatgtggcgttatttctgagggctctgttctgttccattgatctatatctctgttttggtaccagtaccatgctgttttggttactgtagccttgtagtatagttcgaagtcaggtagtgtgattcctccagctttgttcttttggcttaggattgacttggcgatgcaggctcttttttggttccatatgaactttaaagtagttttttccaattccgtgaagaaagtcattggtagcttgatggggatggcattgaatctataaattaccttgggcaatatggccattttcacgatattgattcttcctacccatgagcatggaatgttcttccatttgtttgtatcctcttatttccttgagcagtggtttgtagttctccttgaagaggtccttcacatcccttgtaagttggattcctaggtattttattctctttgaagtaattgtgaatgggagttcactcatgatttggctctctgtttgtctgttattggtgtataagaatgcttgtgatttttgcacattgattttgtatcctgagactttgctgaagttgcttatcagcttaaagagattttgggctgagacagtggggttttctagatatacaatcatgtcgtctgcaaacagggacaatttgacttcgtcttttcctaattgaatacccttaccgatctctacctgcactgcggtgcagttggtggtacatttcttaagtcctcccccactaggctgaacacttgttgaggaccgggtaaggcttggttatactgaacatattagctgggttcctatgcagcttatacagtctcttataggagacaggcagtgaagacttgtaaaaatgaatgaaagaaggaaggagtttgttctcttaataccaatagtaagtaataataattgagctttatatattttctcttagtggaataaacggtcatgttcctattgacataacaagatctatttagaggaaaactgtactttaaccagtgtgagtcagcatatttcaaacataattttaatttggccttatcatttatggtttcttatagcacgaaagtcaaagaagttgggaaagttaaaagggattcacgaggagcagccacagcagcagcagcccccacccccacccccacccccgcaaagcccagaggaagggacaacgtacatcgctcctgcaaaagaaccctcggtcaacacagcactggttcctcagctctccacaatctcacgagcgctcacaccttcccccgttatggtccttgaaaacattgaacctgaaattgtatatgcaggctatgacagctcaaaaccagatacagccgaaaatctgctctccacgctcaaccgcttagcaggcaaacagatgatccaagtcgtgaagtgggcaaaggtacttccaggtaggattgcctctcctttcacaggctgcatcctgaacttaacaagtctgggcaactgacttcgccatctccaaccatgcaggaggagtttgcgttctatgaaatcctgatatcagattttttaaattgataacaaattgatcaagtgtataggaaaaatatggttaatgtgctcatttcttccgagaatgcagggttaaggattttattgttaaaatgacagatacggctgggcgcagtggctcacgcctgtaatcccagcactttgggaggccaaggcaggtggcttactgaggcagatggatcacgaggtcaggagttcaagaccagcctagccaagatggtgaaaccccgtttctactaaaaacacaaaaattagtcctgcttggtggcaggtgcctgtaatcccagctactcaggaggctgaggcaggagaatcgcttgaacctgggcggcagaggctgcagtgagccgagatcccaccactatactccagcctgagcaacagagtgagactctgtctcaaaaaaaaaaaagaaattaaaaataaaaaaaatgacatacacttcttatgttgatcaaaatggaaaatttcatccaaaaatattaataaggtaaaatacattctgttcatgaaatcacaagttgagcacattattagcggctcataacgagggttaatctaagtgtagaccaagtaaggcaaggcctagcaagtaagttgtaagagacctggaatgactcttctgtctaaaaaataatcacctggcccccagcaccctttaaattgtccctggaattcctattttagtcatttttttttgtttcatggtatttaattaataaggcccctcttaatctacagaaacatcacttagaaattgccattacattgtcccagttcattaatctaaagcagtttcttagattacctgtggtcagacagcagctgtaaaagttggggaaagctccactgactgattctttgaagaggagcttgcccagtgaaactccacaggcagaaaaataacatgatgcccctggagatgggggaggtgataaaaaacaaaagaaggcctggtgcagtggcccatgcctgtaatcccagactttgggaggctgaggcaagcagatcacttgaggtcaggaatttgagaccagccttgccaccatcatgaaaccctgtctctactaaaaatacaaaatttagttgggcgtcctggcaggcacctgtaaccccagctacttgtgagcctgaggcaggagaatcgcttgaaacctgggatgcagtgagccaatatcatgtcactgaactccagcctgggcgacagaatgagaatccatcttaaaaaataaataaataaaataaagaacaaaagaagagcttgagtctgtcaggcagggaggacaggtgccagggaaacatgttctaccatagaactttatcaaagtctggtattaacctggaccataggaggcaccacatgctcattttttaagcaccacaaactcatgaacaatgaaatctcccaccattattgcagatacacagggtttgacagttattaaattaccctttattttagtgttattaattgtgggtgggacgaagcaagttttacaggttaatacaaattctctcaatctaaccaagggttttaggctgtcatccacactgaaacttgctgaactttgcaattttagtttgccctggcagtttaccctcatctagaatttaggatgaatttaaagtgaaatgtggaacaggactgggccagtggtgggcactctgtaaatgactgttgaattgatttgagtctgtcagaaaagagaaaagtgaaagaaaggtggctgtttggggttgacttaagaagcatcttcctggaatgtacttaaatgctaagtgtatttctgtgattaattgttttgttcttcaggatttaaaaacttgcctcttgaggaccaaattaccctaatccagtattcttggatgtgtctatcatcatttgccttgagctggagatcgtacaaacatacgaacagccaatttctctattttgcaccagacctagtctttaatgagtaagtacctattaattagccttcataaaataaactgcagagttatgcgttatgatttctttcagtaatttctaaacagatgtacgttggtgaaagaatctactgaaactggcattttttaacgttaaaaatttacagatctctgggaacttaaaaaattactctttgcaacattatactgtatgcttctgagtgtatataaatcagtatatataaattccacataataatatgtgggatatatcccaaaagaaagatgatccagttggctctgaaaattgactggtacaaagccacaattaatagaaaacagtctcttttggtatcgactccaattgggaagacaatctaatttctaggaaatgtgaatatataaagtgccagcttttacgagctcatataatggttcttttgttaacagtatacagctgctcaatgtgttttcatgacaatcgtaattacccttctttgccatcataaaagaagccaaactgttattctgtagcaaaacatttttagttttatgatgcattttaaaagactgaaagaatcgtaatcagtttttctttggccacaaattccttcctattttaagtttacattttaatactgtttgcattcctcattagcacattttatttatgtttgtatctagcagtgcttctttgtaattgttgggtcaagaaatacttaaaagggaatatttgaattatgatagtaactacagccatattctgacagatggctctctctggcaataggaaaacaggggtttcagtaggggaggaggcagatgagaaataggttggtgatgaaagcaagaaaagtaatgcaaaagatgaaaagtatagacagatagtgccaacacacctcagtagtaccagtagtaatttacctaagagtaccagttcgcccacatgtgatgtactgcaaagacaattttattccaaacataaattagaaacatcagttgttggttctcgaggtggcctgcttttggcaatttatcaaaaagagtaattctagtactgcatcagtgttcaccaaaagcatgaagtaaggccaaacaactgacttgcacaatttaattaacttgtattcctcaataatcaattgatattattgaatagtaagcccgttttaaaatatgttctataaaccagaagaaaacacatattaaagagggttcttgttttaaaaggacgtgagtaaataagaatctctattaatgccctcagcgtttgattttaacagaacattaaaacaacccatttaatcttattaatacatctattaatttttgtcataaaatgtgtataacataaaatttttcatttttaagcatacaactcagtagcattaattacattcacattgttgtgccaccatcaccactatccacatccaatacttttcatcatcccaaacaaactctaaacccattcaacaatcactcccctttatcccctcccctaagcctctggtaacctctagtctatgaatttacctattctatatatttaatataagtggaatcatataatatttgtccttttgtgcctggctcattttgcttagcctaatgttttcaatgttcatccatatttagtatgtatcagaattccattcctttttatggcagaataacattccatcatagatatatcaagtcagtcctcattagtggattctgtagttgcatatttgcttactgactgcatttatttgtaatctcaaagtcaatactcacaggatattcatggtcatttacagacaaatgcagagtaacaaagaatttgagttgccaagagagcacattgcagctgagctcacacaagggaccactccgccatcttgtttcagctctcatgctataaactgtcatccttttcacagtctatttattgccacatgttttgcatttttatgccttttggtgatttcaccgtttaagatggctggcccctagacgtagtgctgaagtgctagctagtgttctttagctcaagaaagctatgatgcgcctcacagagaaaataggtgtgtcagataatcattactgaagcatgagttatggttctgctggctatagttcaatgttaacaaactaggaatatatgttaagtaagatgtctttaaacagaaatacacacgaaacaaaattaggtatagatcagttgatgaaatgtaaccagaggttgtaaggaccattaccccaaacttcccctaggaggaatagttgaatatttgctaattcagtgtttgctgtgactttatagaacatgactacagcaaatattttatccaatcatccgttaatgggcagtttggttgtttccacctttgactattatgaataacgttgcactgaatatgggtatataaatatatctttgagatgctgctttcagttctttcagtacctagaattggaatccctaggcatatggtgcctctgtgtttaactttttaaggagacaccacactctttccacagcagttgcaccattttacattcccagcagcaatgtacaagggttctaatttctctgcatccttgccagcacttttttctttttattaactagccatcccagtaggcatgacgtggtatctcactatggttttcattttcatttccctaatggctaatgatgttggacatgttttcatatgcttatgagccatttgtatatctcctctgtagaactgttcatgtaagttctttactcattttttaattggattgtatgtctttttgtacttgagttgtaggagttctttatatattatggatattaaacccttatcagatacatggtttgtaaatatgtgtctcaacctgtggcttgcctttttactctattgaaagtgtcctttaatgcacaagcatttataattgtagtgaagtcaaaatctcttcttttgttgccttttctttggtgtcacttattactttttaattgtttgtaaatatctgagtacaaagggctccaaacaattacagaattgtaagaatgttttttcgtaaatggaacttaggggaaagcaccttatatttgaaggctgggaataatgtacttaaaggggtttagaaataaataagaaacaaaaaaaaagaaaaggtcatataagctttgtgtatttgtctattctagaaaatattgatacagataaaatggaaacaacaaaagataaatgctttctaatattaaaagtagttaaatgttattgatgtaattattagaatgaacattttgttctctgttcttaaaacttttgacctcaacccaacccagacttctgtagggtttctttctctcaactagaaagaatagagcaaagctgtgtttttcaaggggctagggtggatactattctggggaaacaattggaaattatataaagccttttggtcaaattgcatcaaaaagagagcttgatgtggtagctccatcactgggtaccatgatagaccctgtattttttagggaaatcagtaagttacagaggatggccaaatgcatatgcatacatgcttcatcttgcatttattccaggaatatttattaactgttgtcagtattctaagcagtagttttagaatagtgagagaaaaaaaatccctctctcatagaacatacagtctaatgagagagacagaaatactgagttttataagtaaaatataattgtgataagtattgaaaggaaaagtgctctgagagcagttaatgggagaggttgatctagtcaggaaagtcttccttgggaatgattaaactggtgttccccaggtgaaggaagtatacgaggaggaaagttgatctagcctgagagaccagcatgtgcaaaggcccagtgtcaggaagaaacatgggccttcaatgaactaagagcaagacagtgtggctggaggggagcctaaggccaggtcctgtgggtttcagaggccacatcagagacttggctctttattttaagagcagtggaaaagccattgaagtgttctaagtgatggggtgacatttccagatttgcttcttgaaaagatccctccaaatgcagaatggaaaatgggttagaagtgagtcagagcagatgttgggagaccagacaggaggctgcgatgggaatccaggtgatagtgtaaggtgaaatcaacaagaattgctagtaattggatattggcaaggactggagcaggggaagaattagctgtctaggaagacttccaagcctctgccataagtgcctggaaggatttggtgcccctcactgggatagggaataagggaagaagactcaggtttggaagggcaggggaagggagagcctgggaccagttttgaaggtaagattgacttgcctttgaagaattatccaagaagacgtattatataggcagttatttttacaggtcagaagctaaagaggtgtcctgactaaagttaaaaatgttgaactcgttttggaggtagtagttaaaggacaaatgtcgtcacatggatcgcaaggaaagagaggactttaagaaaggagatgcgactgccctatcatgctatatgttgttgtgatcccagtgaggtgtgaactagaaaactcaaagcatgcctcacacattgcctgccaatgccttacacattcctgtcttctgaacatgttctatatgctttcgctgagccattacccgtgctttcctaccttccaccacagcaaaggcagcaatctggcattttgtgtaaagagcagtagtgatgccactcacttgagggcagagtgcactgacgtggtcctcccttgctctcccaccaacccttggctgtttataccacctcccacctggcattgccagctcttaagtacgtgtatctctgccttatttcactggcatacctcactgaagtcacagactctgtcttaatcatttctgaatctctagcagctggcactgtgcctcagtcatagtaggtactccataaatatgtgctgaataaatgaattattgaaaaaatgaaccaaacaatctattaatcagtgtgaaggggcttcctaagtttacatttctaattatgaggatgaagtttatgatgaagtgtgaagtttatgatgaagcatggcttttctgaacagagacattgcaatatttaaaacagaggaacaaaactttgggtttgccttcaaatgtgacacagatctgaaagttcccaaagatcttattcttcggtattagcatcactggagatggaggaaaggtgggaaatagggaataataaaggaaacattctttctaattttttactaaacattggggtgaagatattagttaatactttaaattaacatagaacttttcttattataaactcaaaacttttcaaatatgtattaaatgattaattattcaattttaccttgaaatagcttatcatatattgctacagatcgctgcaagtattcaaatttcttatcaattcactacacatattaaaactcccactgaagcctgtaatgactttttttttctttttttataagatctgaaatgaaggttcagtattactctcttttacatcttggctggtatttgaaaattaaacatatattaaagacttgcttatactacctcaagtagtagcctagtaaaaaatgtttttggatgatcttttactgtcctcagcatctgaactttggattgttttggttcacagactgttggcgagagtgagagagggttgaagtcttagtggcacttcacatgcctctgtggattctctgagtgtctctctgggatgaaggtgacttccacccacaccatcttgcgtctgaagcactagttgtgtgagggcagctccattagacgagtacacaactcagttgccatcggctacttcttatcatgttttcatggggtgctacctgtttctttgtgtccccagtcgctgggtcagtgtgctggcgctgtccagttgtcctcagtgagagttctccccgggccatcctgccaatgtcacagtgccaatgaggtccctctgtaccgaacgttctgaagctccaggaggcctggcttccaaatgggttgtgtgttccaaagtctgtcccaccgtggtggaggctggcatcagaggattctaatggaggccaggggtggttggaggtatggcgagccccagtgtcccttcccacagggagtggtggatcttcctgagccactggaggtgacttctgtgcctggaccctcctcaccccatcagggttagggccagcgatggttgggggacaggaattctgatgagaggagtcagggatgtaggatgaacctggtcagctcctccttcaatggctgcttttgttcttccttctctctccccagcccacttccccttcttctttcaagttaagatttcttacttctccttggctcactgggaaactgttgtgtgatttctgcagcttccagtgtctgcccctcctcccttttcttctcacttctccctgctccttcgtttcttttcccttctctgttactccttccttctccccttctctctccttcttccacctcccactgccccatacatcccttttccttctactgagaaacctcctcctgagatttccattgtttttttaatttctgggtaagtatgagggaataaagtttaaaagaaggaaacaagtcttccttccgtgccttatttttccgttggactctatgaaaaaccaggcctcgcaccagtagctagaggaccaaggcctgcagccgacagcctgaccatgaaagcagcacccccctgcaggtggcacaagtgctgccggtctcactgtggccccactgttcccagcgggggaatctgtctgggtctgcagcaacctcaattcttgcctcctcagaagaaagaatttgaggggcagaaggagagactgaggcaaatgttacacagcaggagtgaaagtttattaaaaagctttgagcaggaatgaaaggaagtaaagtaaccttggaagaggggttactctctctgtgacttgggagatcaagtgtgcagtttgacctttgacttggggtcttacacgttggcatgctttccgggagattgcgtcccttctcccctgattcttcccttggggtgggctgtccgcatgccgggtggcctgccagcatttcggagggagcatgcacaatgtgtttactggagttctatgcatgctcacttaaggtgttcctcccttaccagtccagtattcctaggtcataccatacctgaactccgccattttgcctcttcatgcgcgtgcttgagcccactcacccaactcctgagatcttatcaggaagctgcttatcaccagtttcaggtttttctatctattaggagactgcctttccctggcactggctgacaccagttattattttagagaaacagtataacaactgcctgacctgagggtcgcctgacattcctggtggcagtgagagggacctctcctgccctgatcatgtctgcctgactacctactataacactaccactgcctattttgcatctggctctcttcattcctacctggcccttggagacagtggagctcaagactcttgaataaagaaaagcaacgtcataagtagaaaatagtcgatccttatctgcaaagggcagaagcactccagaatggaaattgtgtttttatactacaaaagtagtgtttagaggccatcttcccacctgaaggaggctagacagagtgaactctaggggaaggggcaatggggctggaggaggttttataagctagaaacaagaacggtcattcagttatatacagggagagaggagaggtagatacaagtccccaaaaccagaattatttccttccctcctttcccctacttctttttaaaatagtatttattcctttttgtcaatctatcatagtggtaagaattagagttggagtagaaagtcgcttttagccaggcatggtacctcacacctgtaatcccagcactttgggaagctgaggcaggaggaatgcttgagtccaggagttcaagtccagcctgggcaacaaaaaccctgtctctacaaataattagctaggcacagtagtgtgcacctgtggtcccagctacttgggaggctgaggtgggaggatcacttgagcaaccaggagttcaaggctagtgagccatgattgcaccactgcaccccagcctgggtgacagagcaagaccctgtctcaaaaagaaagaaaaaaaaagtcatttccagacattttagcagaggaagtgagaggagggaagttctggaagaaatggataacctgctgcattggtgcttctgagttacatcataatgagagaagttccgagactgagcacgcagaagatagggactgcctgtacctgagaaaggtggaaacacctaagaggggagtattaacttaagacgagaactgaggggacacttcctaactcagttcttcatttgtcttttttttttttttttttttttttgagacagagtttcgctcttgttgcccaggctggagtgcaatggtgcgatctcggctcaccgcaaactccgcctcccgggttcaagggattctcctgcctcagcctcctgagtagctgggactacaggcatgtgccaccacacctggttaattttgtatttttttagtagagatggggtttccccatgttggtcaggctggtctcgaactcctgacctgaggtgatccacccgcctcggcctcccaaagtgctgggattacaggcatgagccaccgcgcccagcctgttgtttttgttttgttttgtttttataaaaccctacctctcattttagactactcttgggagaaggaaataagtgatatttattgtcctttcatttggcagatatttattgagcaatttccgtgtattaagcactgttctaggcagcaggaatataacagtaaataaaacaagattccctcccttcatggggcttacagtccagtggtaggtataagttggtggcatagcagaaaaagtgaaggcggcattgtgaaacagtcctgcctgcagtgctgctagagagcagggcttggatcccatccctgatacttgtatatgacaacagcaaaagtggtacttaaaataatatgtcgtttcagtgaatttcctcaagagcttttctagtgcccttggttagccacattggcctccttttgctgcactgaggatccaaactccttcttaactggatgtctgttctctgtgcaggaagatggctctttcgagccttcttgtctcagctctaaatattccttgttcagacagattttgcctgatcatctatattaggctgttcttgcattgctgtacagaaatacctgagactgggaaatttataaagaaaggagatttaattggctcatggttctacagtgtacaggaggcatagcaccggcatctgcatctggggaggcctcaggaagcttcccatcatggcagaagctgaagggagagtaggcacatcacatggcaaaagcaggagcaagagagatggtggggagggggatgcgccacacacttttaaatgagcactgtcagcgggaggacagcatttagagcaaggcggtggtgctaaaccatcgattcgaaatccaccccgaggctgggcatggtggctcacgcctgtaataccaacacttcgggaggccatgcaggcggattgcttgattgctactcaggagttcaagaccagcctgggtaacatggtgaaaccctgtctctaccaaaaatacaaaaaattagtctggcgtggtggtgcacacctgtggtcccagctactcaggaggctgaggtgggagtatcacttgagcccaggaggcggaggttgcagggagccgtggttgcgccactgcactccagcctgggtgacagagcaaaacgaggccctttcgggggtggggaagaaagacgtgcacccctgagatccaatcacctcccaccaggccccacctccaacactgaggattacaatttaacatgagacttagaggggacacataaccaaactgtgtgatctaggatctataggtcctagagctgtccgtcaggtctgggatacactcctgccacttccgtcgccattcgatcacatctctgttttctccctagtaacgctcctgcccgcattagtgtgggcgctgggagggcaggaacctggcctgtctgatttacctttgcattgccagctcctaaaatgctgcctggcgttagttaagcacttgataaactaattaattttaaaatgctattttcagcattatttcctgctgcttctccgcatatactccacaccagccaaattaacctttctctttcctaggtctttctactgctgtgcccttgctcctaatacttcccttctccctccctcaagcccaacccaaagcatactttctcgctgctgacttgtcttaccattaaagaatgactttcccctcatacactctatagcagcggtccccaaccttttgggcatcagggaccagttttgtggaagacaattttccacagacctggcagggtgtggggatggtttcaggttgaaactgttccacctcagatcatcgggcattagttagattctcataaggagcatgcagcctagatccctcatgtgcacagttcagctagggttcgcagtcctatgagaatttaatgctgctgctgatctgacaggaggtggagctcaggctgtaacactcactcgcctgctgcccaccacctgctgtgtggcccagttcctaacaagccatggactgtaatacagtctgtggccccaggcttggggacccctgctctatagtacttcttttatatctcaatcatttggtacttactgtgtctatatatgttttttactccagatatactgtaaatacctagagtacagaaaatatgcttgttaaagttatccatagtgtctagcaaaatacgtgtgtgtgtgtgtgtgtgtgagagagagggagagagagagagagagagatggagtctcactctgttgcccaggctggagtgcactggtgtgtgcaacctccgcctcctgggttcaagtgattctcctgcctcagcctcccgagtagctgggactacagacgcctgccaccacacccagctaattttttgtatttttagtagagacagggtttcaccatgttggccaggctggtctcaaactcctgacctcaagtgatccacccaccttggcctcccaaagtgctgggattacaggcatgagccaccacacccggccgcaaaaatacatataactggcgctcggtaactgtttttggtttgttaatatgtgctctttctggcacatgggtcagaatccaatttcctgatgtggattgaccttacagtgttttggagacttaacatgtaagcttaatgaaaaagattcagttttgcagacttctttaaattttacttcaagagtactgctgtatgttaatattccatgtatgatatttcttgtagcattcttgagaaatttcctaaggagttaatgaagctgggtaattgccagggtagtatgaaattaaagcaaaacaaatatgagactgcaaatggaatgaactgtttaagctatatattactatattgggatcagatagagtagtaatgatgcaagaagtacatccaagctttattctggctaactagagggagctatttttcatttttaataaaagtcaaaaacagtttaagatcatatattatcttcaaaaggcttagtgtggctaatattagcatattgctttttacttcagttaacatgctcaagggccttggtctcttcagctaaaaatactcttcttttctatataaaataaagtccctggagcaaatttctttctttttttaacttttgtagagatgtggtctcactgtgttgcccaggcagtgtagtagcacaacggctcactgcagcctcaatctcctgggctcaggcaatcctcctgcctcaacctctcaagtagctggaactacaggcacgtgccaccaaactggctaatttcttcgtattttttagagacagggcttcactctgtcacctaggctggagtgcactggcgtgatcatagctcatcgtaacattgaactcctgagctcaggcagttctccacctcgggcccccaagtagctgggtttacaggtgtgagacaccatgcccagcctggagtagatttctttattgaaaatttggtaaatggagaaaaattaattttatgcagtgattctattccgagatagggcaggtggaaaggaatgggccagtcaactctaaaacaaaggaaggctccagactccccccttgacacaggccacaagacctagagatagtagctttgctggcactgctctggattgaagaagggaaacacacttgaatgtgtcttgctgtttaaagcattttatgaacttatgtctttagacatttctagaactgaaattgaaccacacgattatttttattgtatcacatgagagatgattttggttttataattttcctcttttccacccatgaaccccaagcttatttaatagggtcatgtggggaagggctctgaaaaggttgtttaattttccctgggttctggcagctgacactgttctgaaaaaaacaagtggaggatgaagggaaacaaacaagaaggtcatatttggagaccctcggcctgcttattaaagcgcactgtgcacttggatcagtggagctgcagtaggagtgttgcccgagccaacatacatacctacaggtgtgacaaccttgtataacatcatcatcacagacatcatctgtgcccctctcccttgaaatagacgtcacttcaacagaagcagtggaattagcagtttagaacttccccacttcctgtccactgcagctgtatgtcagtctccacttacctgggcactatagtggaaaagtaactgataatcagtttagagggagattttgaaggattctgagctgatgctggaagcttatggaaggtgtcgtgctaaatactatctccaatactccattttatttaatcctcacaactctgtgaggttggaatttatgatcctgcttttaaagatgaggaaaccaaagcccaaagttttgaacacaggtgtctgtctatccaatgctcagagttttttagctacataaggcttctacctttactatggaatttggattttcaggcagttacacacagtatagagctttggagcctaatgatggtttcagacatgatatatatttgaaactctaaccaatcatcatttgtccatattgtactgcaataacacaatccctgattctgggtaatttaaagaaccaagatttatttcttacggttgtagaggctgagaagcctaagatcaaggggcccacatctggcgggaaccttcctgccgcatcatctcatggtagaaggcagaagggcgagaaagaaagagaaagagaatgtgcatgagcacaaatggggctgaaacttgcttttataacatatcctctctcaagataacccactcctatcagaacatgaatccatccatgagggcagcatgacctagtcaccggttattaggctccacctctcaacactgttgcatttgggattaagtttgtaacacatgtactttgggggacatattcaaatcatagcactaatcatgtatcatctttcataagaattatcctttaaaataagtgagatggctgggcatcttggttcacacctgtaatcccaaaactttaggaggctgaggtgggcagattgcttgagctcaggagttcaagaccagcctagggaacatggcaaaaccctaactctacaaaaaatacaaaaattagccaggtgtggtggcatgtgtctgtggccccagctactcaggaggctgtggtaggaggatccacctgagcccagggaagttgaggccacagtgagccgagatcgcacctgcactccagcctgggcaacagagcaagaccctgtctcaaaaaaataaaataggtgagagagacatacccaatatatgaacaacacaaatgggaaataaagtgttcttagaaaaactggaactttggttcatattttaaattatttctccgtatctgtttttcttcctttctgatatcatgacagtatttaagagctcaattgttgaagacgtaagccccggtccctaacattgtcgttaatgagcttcatgttgttgagtgagtgagccttcaattcccttctacagaatgagggaattagcccagaccagcagtttgtaaacagtgtgttctcaggaccctttacgctctcaaagcattgagaatcctaacgagcttttctttatgtaagttatatctattgatatttacccatattagaaattaaaacaacttttctaaaatattgatttatcaatttattttaaaagaaacataaagccatcacatattataaataacataaaacatgaatatttttatgaaaaagaacttttttcaaaaaaagtgagaagaatggcattgttttgcctgtttgcaaattcctttaatatggcattctctcttctgcttcttacatttagtctgttgtgatgggttgttttgggggaggtatatgaaaaaaatttagcctcacccagatacttagttggaaaaaagaggatctgacagactccttgaaagggttttggggacaccctggcgtcctcagaccacaatttgagaaccactggactagatgacctttaaaacccaacccagactctaattccgcctggctttggggaagcctcacttcaaggtctggatctgtttcctcattcaagaaagacttaatctatatatcagatgccggaaaatcaaagctagatagaacatagtccctaaaagggctcatagtctagtagcaaaatacttacagagcctaccacgtgccatttactctgcttgatgcttttgtatgaatcatcttatttacagaccaattacattttaaagcagatattattgtcactctttcataaatgatgcagctgccttggcagagagagatccaataaattacctaagatcacatcacactgagagatgggcctcaggtctgagcctaggactcccctcacagtgcgtgctgttttcgttatactgcatttctcttctctgcagaataatggagatggaagtgtcttacaggtcccctctaccttcctatggttatgattatatagtgctaccataccagtgagataacttattctcatagctttgagaatgtgtggttagaatgtgttcaaaaaagagtagtacagtattataaatgaatatcctaatcacttcccctaaagtgagaataaattctctttatttttactatttagctaaaagaccagcctttcgccagtcagtagtaaatattgaaactatctataccatggtggctactgtacagaatcaaaagaaatgaaacatataacttccatcctctagaattctatagtgtagctggtgagttactggacaagtaagacctaaatgcataaatggtggcccaacaaggtgaagacaaatgacggatgacaggtgttatggatgggcactcgagtttaaaaagcaggtggcagctactcaggaggctgaggcaggagaacccctcgaatcttggaggcagaggttgcagtgagctgagattgcgccattgcactccagcctggacaacaagagcgaaactccatctcaaaaaaaaaagcaggtgactcttctggactacagtggtcaaggaaagctgccgggcaaaactgtgtagcttgaaaggccatgctgtcctcccagagggttagaattggatgggtatagtgaagtgggtggtacaatccaggcgtgagatgctgtacctgagcaggaaaggggatgggtctctgcaatccagagttgaagctgtcaaaccacagggcccaaagaactgcaggcttaagcttcagagggagggggctgtgtctctccccctctccttttgttccctcaccatttctgcttcccttccttctctccatgactggtcccccactctttctcctctcatttttctgtttctgcttgaccctttctctttcccttccttttgctctatagcccttccttatctcatgtagagtgagtgggacagtatcattttttattgaataaaaatgctacatcccattgtcttgcctttgaaattaggcatgctaagacttttacagacttttccagagagagaacacagactggacaaagtttttttgtttgttttttttgttggttttggtggtgttttttttttttgttttttttttttttttttttgagacggagtctcgctctgtcgcccaggctggagtgcagtggcgggatctcggctcactgcaagctccgcctcccgggttcacgccattatcctgcctcagcctcccaagtagctgggactacaggcgcccgccactatgcccggctaattttttgtatttttagtagagacggggtttcaccgtttttagccgggatggtctcgatctcctgacctcgtgatccgcccgcctcggcctcccaaagtgctgggattacaggcgtgagccaccgcgcccggccgtttttgttgttttttaaacttcagtatgaacttctgtgctcttttctttgagatggttgctcctaaattgaaaactttttttttgcagctccatcagtcttggtcttaaaatcagtgaaatttcagttgcagaaattactcagaggaatgacttttctttactattattatttttccctgactgcttgtcttagtttgttagtgccactgttcgcaaagtacgtgagacttagtaatgtataaacaatagaaatttattttcttacagtcctagaggctgagaagttcaagttgcaggtgccagcaggttcaatgtgtggtaagggctgccatctccttccaagatggcaccttgttgctgcttctaccagaggaaaagaacaccttgtcctcatgtggcagaaaggacagaagggccaaactcacccccctcaaccccttttataaaggccctaagcccatccatgagggctctgctcttactacttgatctcctcctacaggaggtgattgtagcgggtgattgagaagtggagcctcctacaggcctcacctcttactagcacattgacaattaagtgacaatatatgaattttgagggacacactcaaaccataccactgctgttccttttccttgttgcagaaaacattgctgccaagtggctgcccctgccccctttccttccctctcacattctgccaccctccagttctttgtacaaagcatcacagtgagggagggcttggactgcacttgcctttctttcacaagattgccaagagcccagtgctttactcaagaatcccagggagggttgagcatggtggctcacgcctgtaatcccagcactttgggaagccgaggtggggcggatcacctgaggtcaggagttcgagaccagcctggccaacatgcggaaaccccatctctacagaaaaaaaaaaaatacaaaaattagccgggcaaggtggcgcacacctgtaatcccagctacttagaaggctgaggcaggagaatcacttgaacccgggaggcacaggttgcagtgagccgagattgtgccacagcactccagcctgggcgatagagcgagactccctctaaaaaaaaaaaaaaaaaaaaaaaagagagagagagagagagaatcacagggagctaacacttttaaggtgttgtccttaacactcactgcttctaagcaatgaacacaaaaaaccaacaaatcatttatcattaaagagaaactgcaccgctacttagttctgattagaggaagttcacagaatttcgaagtagaggagaaggttagaaaatgtcacttttacccctcatctatcttgagaaaaggaatttcatacaagtggattaaaaggataagaaatatttagactatacattgaataatcattgtattcatgccattttgtgtgcatgtgtagtgtatgtttcagtgttgatgttttgtgggaaatgaatgtcactggtggtatagtggcctggtggtgttacacttatttcacccggtaatgaatgatgcagttgttcataatgtcctgaacaaaatctgctttgtgacagatgttcagaatcagtaataagaaacgacacgtggctaatctctaataaattaattgagttggacatcacccttcttttctattcaggcagatgatgtatcagcttttagatgattccaatagaagaaactacctttcctacagaattgtggcatccaaaaatgttttctagggtataatttgattaatgaatttaatagtgtctatgataacagagtctctggagctttagctgttttcttcttccaaagtaagaagatagaaagcaagtgtgcttactttacgggatcatagacttcaagatagaaaaaggaatcagtgatcctataaagtgagcacacctgctttctaccttccttgtccccaccccaacacattcgcacactgcaaaatcacatctgcccatgtgagccactctctgctgtcgccttggaggcacaattgtgcacccagattttatcagagtaaacgtccttctctacaccatcctgcgccagcttctggttactggagtaatgcgacttttgctttaggaagaatatgactccatgaatgtgactccaagaatatgaccccatgagttgttggttaatacaaatcttttattgtagtaggaaaaagtaatttcctgtcaccctttacccaaacaatagtctggtaacgtttctaaattagcatttaactattgaatttcaagaatgtgaacaaagttatcaagtaaaggaatcctacctttttgcagccccattttataagtgaggaaacgatagtcatttattgaaagtaagcagtgtctttacgtttatacccaaaatgtccctgtatgaagcaataatatctcaccaaaggttttctgtcttctgtttaaccatctgagatctgcatatcattaaattttcagaaatttagtattaaaatctatagcctagcctacaaatacgaggcttgagagtgaaaaaaatacttcactagagaattttttcttttttttttttttttgagacaggttcttactcctgtcgtccaggctgaagtgcagtggccctatcatggctcaccgcgtcctcagcttcctgggctcaggtgatcctctcagctcagcctcccaagtagctgggactataaggacccacaccctactaatttttacattattaatagagacggagtcctactatgttgcccaggctgatcttgaacccctggactcaagtgatctgtctgcctcagcctcccaaagtgctgggattacaggcatgagccactgcacctggcattgagaatgttgttcttctgtattctttctatgggtgtagcaactctggcagtaagtcttaacatagcatttattaagtgatcgtgagtctccaagcttgctgttgggtgttttaaccttaatacagcagttaggagaccagaatctgagaccagacagcctggattcaaatcctagaatgctgttttcagtgaggtttgactgcctttccaaaaaatttctcggaataagcaaatcattatagtctagtcgacacttagagcctgttcttctgtcaaagccatatataaactgtcttagcaaagcctggaatttaaaaatttagtttactaaatcttaaaatatccagtgatatttggtactatcagaatggcctctggtagtaggctcttctagtaagaattaagtgccaggcgtattcatggatttccctgtaccaaggcccctagtatctgtatagataatgtccagtaaactatttttcctttttaatctcctatagtttgctctttgtctttttttagtgtgtggtgtctagacacatatctcagagacagatgtgcctcacatgatacaataagcagtcctgaaaagttgcttagaaatcacttttttaagtgaattgtattggtactggtctgcctggggaaattcacagttcaaggaatactaagattaaacctttggtcaagcaaaacatttttgtaatgtgatttatcacagatacccccaattttaactttgttcgaaatctgaattttacagtggattatggctacatgttttctctcctgcactaaagacatatatccttgtaccctgaagaaactgctgactatataagttattttaaaaactactgtataaaggaatgtttttaagaatactatatataggatttatggtttaaaaaaattttttccagacttttaggactatcattggtaaattacagttgccatataacaaggccccttctagatttttacattgtcacatgttattctgatctgtgtatcatgaattaaagtcagtggatatttgatgttgaagtccaagggcagttgtatgaaaacatatctcttctggaacatcaactaaggtgataaaatactgaattagcttttaactattactagaattgaccatgcagaattaagagagaatggatgaatgttgtggagaccaatgggacattagtctctctaacacattagaccagtaaggcagaccacaatagcattctcaggtgatttctagaccttatggctgagttctaccctggttataaataaactctgcaagtactataaaaatgaacaggtgtcagaactgcaactagcaaaatggtccttctacagatacatcttgtttgtcagttgaggaaaaattaataagactatgaaaaaaattaacagtaaactggaataatttgaatgttcaaattggggtcatttttattctaattgaggtttgaaagaaaaaacctgtttttctgcatgctgtttttaggaatataataagcctgagacatggaccatctgttatactgaccatgtaacaagatgttagatttattcagacacgatgcagtttgcagtaccagatacaaggtctggtctttcaggtcagctgtgattacgtctgtgcaccacaccagtcaagttatttaactctctgttgcgagattgacactattgctgcctacattctgacaatgtaacacacacacattcctagaggcagtttactaaactaataaatagtatgttaacaaacatgtttggctgggcgcgatgactcacgcctgtaatcccagcactttgggaggccgaggcaggcggatcacaaggtcagaagactgagaccatcctagctaacacagtgaaaccccgtctctactaaaaatacaaaaaaaattagccaggcattgtggcgggcgcctgtagtcccaggtcccggctactcgggaggctgaggcaggagaatggcgtgaacccaggaggcggagtttgcagtgagccgagatcgtgccactgcactccagcctgggcgatagagcgagactctgtctcaaaaaaaaaaaaaaaaaaaaaacaaaacaaaacaaaacaaaacaaaaaaaaaaacgtgttcattgagaggcctcctcttgagattccagagacttcaaccctgattgagcaaaacaaaacaacctttgttttgtttatatctacaaagaaaagaacagctgaaagtctatgaaatctgttgatttacctgttcctgtttattgccagatatttatttatcactcacataattgttgacctatgcaccatacaaaaatcagtcatagaaagatatgcaccccactatccagaagagtacacagaccttcagaatgatgagagctatgtagagcttaatccaggggctaatgtgaagtatttcaaaggcttctttttgtagttccttcttaaataaagtgatgtcttacatacctaaaaggtatttagttgacaaggtacagttcagtgcagtattactaaaggatcttacgtttaaaaatgtcattgtacttttcataggttcccataggtggaagagttgggaagcttttgtgctttggcatttataaaatcggctgatgtgaaaggattacatttattaaatgtgagttcgtggaaagagaaaagagtgataaaggtagttctatttttcttcccctttagggtaccaaaactatatcagaaaggtctttgaggaactgtttctgagtgactttttgaaatcacagtttattaaagaatttttaccccgcatgctttccaaaagcattgagcatagcttgcaataaaaacacagatacggtaaaactaaaaactattcaagacacaaaaaggcaaaaagcaagtagctaaaacagtaagacagacattttgtatattataaaagaagaatgaatcacctgaatgctaacagaagttgcattattaaacacaaatattagtttcttaatcgatctcaaagtataggctgggtgcggtggcttacacttgtaatctcagcactttgggaggcgaagcggggggcagatcacctgaggtcaggagttcgagaccagcctggccaacatggggaaaccccatctctactaaaagtacaaaaattagccaggcatggtggcacgcgcctgtaatcccaactacttgagaggctgaggtggaagaatcgcttgaaccagggaggcgaaggttgcagtgagccgagatcgtgccactgcactctagcctgggtgacagagcgagactccatcaaaaataaataaataaataaataaagttataacaggtaggattatgggttgtagagattcttgtttttctaattttcaaaacatattttagttgtgataaaaaaatacacataacaaaatttgccttctaaccctttttacgtgtacagttcagtagtagtattacattgttgtgcaaccagtctccagaactttttcatcttgcaaaactaaaactgtactcactgaactaattctgcattcccacctacccccagcccctggtaaccaccgttttacttactgtttctatgagtgtgactactttagatagctcatataagtgaaatcatgcagtatttgtctttttctgacaggcgtattccatttagcataatatgaagcttcatccatggtgtagcatatgtcagaatttccttttttaagactcaataatgtcccactgtatacatataccacatgtttatccatttatctgtcagtgaacacttgggttgcttctatcttttgcctattgtgaataatgctgctatgaacaacaaatatcccctcgatggcctgctttcacttcctgcagagattcattaagtagaagttagcatcaagaaagaagctttttccaggcctaaagttcaaggtccatgtatcacatgagtcttaataagaatgatgagtaacaaaaaatggaagtcatcttcagaagccatcttgcaaagatgcagtttttctgcaaagggctatttcttggcagagttcagtggaggcataatgttaaataatgtctgcaaaatgcactgctttggaggcctgcctatgtgacttcctagtggtctagccgaatttcaggggtaacaccttgggaaaccattaaggagttgagtggtaagcatgcccctaaaactagcccctaaaactcaaaggtgaactcaactgagcccttgacaagatcaaggcaacctcagaatagaggttgctgatgagaacctggaatgagtgggaagttcaaaccatcccacagatttagacagtggaagatggaagagccttgcttgtgttctcactgtggtggatggccaccgcatgaagtgtccgtgaaggtgtttagactcaaacttagagctcccaagttctacaggcattcatagcctggaatgctttgtagtttgggcttgtcaaatatctacttctgtcaaaatacaacatgaatatgattctacgattacatttaatttggggcaataatttctcaaatcaactacttctagaaggacttccagatacctgaatggtaagccagtacctgcaaaacaagagtgttccttctgacagccattggctgataggctcaatggactagtctcataatgtgaaatagggcaacacggttgacataatgatggtaagatagcatgggtgggtcctgtagataaaacagttgttcagattgtttaggtgctcagttaaaagcaggcagccagcacccaagtcatttaaattttgaaagccctactcacactcggattttaatgggctttttctaattcccactattcttacatgaattaaaccccatttctaaccccaaattctctccaaagcaaggaaaaaatattgtctaactctcattattcactttagtcccaagtgaatcagatttggagaagttagataattttaacttaatattttaaaactatttccaaatgatcatatgattttagtttagtacaatggatgttctaagagaagaccagatgaagttatagctacaaataaaattggcttcctcatttgagaaaatttcaagtttacaaaactattgaagtgttttttaaaaaatattttagaactattattcattttaacccaacctctggaatgggtctctagacccactttggctgctgtgtttatttatccaaaagtaaagtttttattctgttcctgcaaataagaagatatttagaaatggctgacatgtgcaagtatattagtactcacggttcttaagtagagactagcagctgttagttactcaggtctgatgttcactatatggctgttttctacatcagtaatctattaccacatttgtattagtccactgttcaagggtgacttttggtcatggatttacttttgttttacagaagcattatatgagcttgcttctctttcccaaagtagtcagtatatttttacattattctattcaaaatgaggtaaaattataacatgaataaaagcacgtagcaaagagtatattctgtaaagcgatattgcaaaattaataccaatattatgccaaaagattgtccttatttcaacttccttgcatgtacatttctatacatttaatttaattgtgcaaaaaaatgcacaattgcacaaaaaattgtgcaaaaatgatgtgatataaaatgcattttcaagatgacctattttcttgaaatttcaagctatattgagtgctcagtactcttcatttagagaattcgatttcatgcaatggaaacagcaatggaatttgaaaacacaaaatgttaccacataatggggagcaaagaataaacaaatgagtgactgtaataacaaaacactggaggtactgaatagagttgtatgactctggaaaaaagggccaaaaatcattactcagcttggcacacagagaaaggagaaggcctgagttttgaagtaaaaaacctgggtttggatcctggcttcacatgtacctaaaattccttatcatgaatatgagaataattcctcacagggcattttgagatttagcaagaagaaatttagctctggtgggtggcgggtaatccataaatgatagctatggagactgtagaggttatttagttaatacctcacaaagagttaaaaagagatgctgttcatactgcagtggcaaaaaaaatgctttctttaggtgtgttgtcacacattaacgttctaatctgttttcaagtggaatctgaggtctctctttaatctttaatctgtgtgtggatgttttgttaacacatctgataacagaaacactctgacatggaggtgttccgttctcatgttctactctaggcaagttatttctaccttctgaaaacctacattatctctggtttttccctagatttgccatcttctatatagaaataatttaaaataataacataatactgtattcctgaaaacttattttaagacttgactccttcttggtttgtttcaaccaaatgatcattggtctcttaagaagcattgtattctctccatgatttccaaataaagctaacatgtgtgaagtataatttaagagcttgcatatacttagttcatacatccctgcaagattggaattattattagtattccaattttatatgtgataagcctgagatctcagatggtacatgatcacaaagctaccaggtcacatgctaccagatcacaaagccagcatgctgaaaggctgatgggctgtgcccctctaggacctgctggggcaaagccagggatgcccccttaaggaatcaaatgcatatgagcacatttttcaagccgcacagtatgaaatgcgtgttgtgttgtgctccacagacatcctgattttccaatttgctttacccatgtcacaatctaaatcagtctttctctctcaaaaattttgtagaacttcctaaatgcaatatctaattttgtggccacttgataatcttactttttataaattgccagtattttccttaattatcatcatcatatgcaaatctgtatgttttcatagcctttaactgttctcttttcttttttcctttccttctctctatcattcattcatgagaaatgcttagcaaagattgacacatagcacttgtttatcatattctttttgacatttacaaaagttagacatggatcctgtcttgaagaagtttgcagttaccaatcaaaatgatggaactaaactgagctttttaaatttttctaaacacacagaaattctgcatttaaaaaaaaaagtcttaaatatatagccaagctcaaaagaaatgtttttaaaaggtgcaaaactaggaaattcataggcagggtgctttaaagcagaactaatgccacagatggcccactgactattgaatacagatatgcgcttgaggagtgggtattagaacacagacagagaaaggtgacaggaagctagactccaacaaggccagcacctgaaatagagctccctgcataaatccagggcttggcaaagatttcgctgtctactaacaaggacaataaaactaaaccaaccagccagcatggcaaggaagctgaaagaaataagaaacaaaaacctgcaccacatcaagtgtggagtctaaatttaaactacatgagtcttgcaaaaagtgtttaagctgagaaattagcataaaaactgctccagaacaagtaaaatgcttatacccatggcagtagcaaatgctaaaactctgtagtgtcccatccacaagccagaacccatgggattcacctagaagacaatacatgccaaaacaatacatgttagatatgcatattagcaccccccaaatttgaataaaacatctgaaagaaactataaaataaatgtttaaatatctagatatgtaaaggaaaaatacctatggaaaagaacagaaatgtttgagagagaattgaatagagcatttctcagctcctcaacatgaaaaatactgccattaaaattaaaacactatagatattaaatggtagattatatggaaaagagatctgagaaaatcacctaggaatgcagtacagagagataaaaagtgagaagatatgaaagagaggctaatgtggaagacatgaggagaaggtccaacatactgctaaatggagtttaaaaaggaaaaataacaggaacaggatggggtgatatttgaagggacaatggctaaaaacattttagaactgaaggaatacttacgtatgcaagttgaataaggacattgagtcctgaacaggagaattaaaaatcagtctgcacctcagtacatcataatgaaactgcaggcaatcatataaatagagaaaaaaattttaaagctaccaaagagaaaaatgcaggctaccttcaggagaatgacaattagactaacaggaaatttcccaaaagcaacaattaaggcccaggtatagttgaatactatctgcaaagtactgtcgtaaatcacctgtcaagctagaaatccatagctttttaaactatcatccaggaatgaagataaaataaagacattttcagacaaattgagaccaaaagatgtgagacatgaactttggtttggtttggtttggtttggtttggttttgggatggagtctcactctgtcacccaggctagagtgcaatggcagattttggctcactattactccacctcctggttcaagtgattcttccacctcaccctcctgagtagctgggattacaggcacctgccatcatgcccaactagtttttctatttttgtagagatggtgtttcaccatgttggccaggctggtcttgaacacctgacctcaggtgatctgcctgcctcggtctcccaaagtgctaggattacaagcatgagccactgcacccagcccctgaacatttatcaactaatcactgctgaaagaattactaaaatacattcttcaataagtaagaaactgaactcaggagtaaagtgcaagaagtgatggtggtcagagaaacactggggaaatctaagcagacctggagtgtgtgtgtatgagagaaactagatttaacaatgataacttaaggtgtaaaaacagcatgtatagcttctaaatccagtagagccatagcagagaggggatatcgggggaacccgcccccagtatttcaatgtaggttctttctattttccataagtgttggccagctgagaaataaagagacagtataaagagaggaattttacagctgggccactgggggtggcatcacatatcggtaggatcatgatgcccacctgagcctcaaaaccagcaagttttattaagggtttcaaaaggggagggggtgtaagaacaggtgtaggtacaaagatcacatgcttcaaagggcaaaaagcagaactactaataaggggctaacaaagatcacatgcttctgagggaacaggacaaagtgcaaaaagcagaactaccaataagggtacaacaaagatcacaaggcaaagggcaaaagcagaactactgataagggtctatgttcagcagtgcatgtattgccttgataaacatcttaaacaacagaaaacaaggtttgagagcagagaaccggtttgaccacaaatttaccagggcagagtttttccccatcctagtaagcctgagggtactgcaggagaccagggcgtatctcagtgcttatctcaaccgcataagacatacattcccagagcggccatttatagacctccccccaggaatgcattccttccccagggtattaatattaatattccttgctaggaaaagaatttagtgatatatttcctacttgcacgtctgtttataggctctctgcaagaagaaaaatatggctttttttgcccgacgccgcaggcagtcagaccttttggttgtcttcccttgttccctaaaaatcgctgttattctgttctttttcaaggtgcactgatttcatattgttcaaacacacgttttacaatcaatttgtacagttaacacaattttcaccatggtcctgaggtgacatacatcctcagcttacaaagataacaggattaagagattaaagacaggcttaagaaattataaaagtagtgtttgggaactgataaatgtccatattaaaatgaaatcttcacaatttatgttcctctgccacggctccagccagtccctccgttcggggtccctgacttccagcaacagggggctaaaaagctaggtcaatccaatgaaaggaagagaaggaggaagaagggaaagaggaaggaaagtaagttaaaatggtagagaacatccaaacttgtcagtaatcatgataactaaaaacagattaaactgagttattaaaatacagagactctccgatttcttaatccagccttttctgtttagaaaatatgtgtgaaatataattacgtgggaagtttgaaacaaagggatcaaaagaaaggtggacagcacacctgacaagttctaaagagagcaagaaaaagaggcagagagaaagaaaaacaatgtgaagatcagatatttttaaggcaaaaaattattaggaataaaaatggtgttactcagtgcgagaaggaaaaaatgggtaaaattggtaaagatatgaatagtcaaatcaccaaagaagacacccaaatgatgagtaaacatttgaaaaaatgctgaacctactggtgatgatggaaatggaaataaaagcaaccatgtactatccattcaacctcccatcaaatagaaaaaaaatgaaattggataatggcaatcattggtggggatgtgaagtaagggcacgctcatgctctgctggttggaatgaaagcaggtgacatgtgcaaatctatgactcagaagttctgttttcattctgtatcctgtagaaacgacaaggatattccttgggcatcatttgtgatagcaataaagagcaaacaacccaagtgtccatcagtagtggaatggataagtaaattgctatacattcaaacaaatgaagctcgaagcagttaaaatgaattaacttagttacctgtatcaaaatagatacatctcaaagttactgttcaataaaaataagttgcagaaggatgtgcatatctaatttcaaatttacataaaacaaagcagtactgtatgctgtttttgtagatacatacatgtgtagtgaaatagacacatctgagaggaaatgataatcacccagactgggtggttctcttcttgaaagaggaagagatggatgggattggggaagaaggcagagtgggccttaactctgccatttttaatttttaaaaatccggtgcacatattgcaaaaatagtagcatttgtttatactgttaattctggatggtagatttggaagctcatgctattagcatgtgtgtgtttaaaatatttccttaatttaaaatggcttctatcttactgggggagaggaaagacatacagtaatgcagagaacatgtgctgtgtttcgttatgggttccttataattggcattcagagttgagttgcaagagatttctgccaattgaggggagccccagaatccatcctgcaaaagagatccccacattgctttcctgcagacgctgcctgctttcagtcaccctttaatggatccactatccagacctcgttttctgtttctttggcctttggcaagtcctttcccatttttcaccaatagtgtctctttcactttttacggtctggtcaccatgaaccagtagttatccagggccttacaaaaggtttattactttgaaggaaaacatctaaaaaaaatagtgatgccttgcttacttctcaagaaaagagaaaataatgacttctgtttttagataacatggatttttatggaagcatttggatagtggtgtgagggtattgtttggttgtgtgtgtggaagtatttgtatatgttgtgccaaactcccttgtcattttttctctttatcagaaaaattccatttgacgttctcaccttttaaagtattttttaatttcccttttaaaacatgttgctgtaaatagttaataacatgctccatgacctctgtaaggaaggcccatggagaaataagattggtcatccccatcctatgttcgtagcatctagcccagtcctttcctataagtgctggatatctgtggctgaaaaggaacaagagtcagatcacagcagcttctctgctttgtggatggtctcactgtaacacactaaaatcctcatcagtcagtattactcttgacataaaatgaaatcatggcatactttaaaagggttggtttcagtgctcctgacacattctcacagggtacaagtaaacggcccagcagtattggtctagaagcaatttaccagtcactatgaaaagcatctaacttgtctttaaaatacacatctgctccatgttgaagccaaaaggagaattctgactcagatctcttattaagctgcctcaggctgccagtctgggtttgataatgaatcttgcattctcagacattttcttcttttcctttgcagagagaagatgcatcagtctgccatgtatgaactatgccaggggatgcaccaaatcagccttcagttcgttcgactgcagctcacctttgaagaatacaccatcatgaaagttttgctgctactaagcacaagtaaattgatgcccattctggcactgtttctatattaccagatcatcttccccatagggcagtaggctatttattgtattcaggtagttggtaccaaaacaaaaacaaaccaaacagaaacactgaagaaatgggaggaaggctttgacctttgatgaactaagttacttgcaaagtatgaagctttgggcatgtgaaagagcataccccaacattccttcatccatccaaccactcagtgtttataaagtatctgttatgtgtatggtaggattgggcaattcaggaaacacaagggttaatgaagcacagtctttatcctcatggagtttatactctaagcaaagttcaaagatttttttttttttttttgagatgaagtcttgctctgttgcccaggccagagtgcagtggcatgatcttggctcactgcaacctccacctcccaggttcaagcgattctcctgcctcggcctcccgagtagctgggattacaggcatgcaccaccatacccagctaatttttgtatttttagtagagatgggctttcaccatgttggccaggctggtctcgaactccggtgatccaccagcctcagggtcccaaagtgctgagattataggcgtgagccaccacgcctggccaaagatatctttaatacatatggaaagtaattatttactatgatggaggtaaggaatgtaatggtggttcaaagaagggaagagcacattcagttctggggatctgggagggacatgtgatgcagctggatcttggagggttttgcaagggtcgtaggttggatagaaggtgtgagatggcattgccatgagcatcagtaatgagtgtggacctgtggggaagtctatataggcagtaacaacacttagcgggaaggggttgttttgccttccaatcctttatttacgtattcatttattttttaaaggtgcatcaagttatgttggatggaggagttgtgggtaataagattggggtgtggattagaccaaaatattcaatgtccattgaagaaatctgaacttcattaggtgggcagaagagggcaatgctgaaggcttttgagcagtggggtgacaggatcaaagctgtattgtatggctttataagggtctctctggcggaatagattcaagaggagagagacaggataggagagaggcagagacagagaacttagcccaactggaagcacagagacctgctgggagcctgtggaaataatggggggtattaccatgactggtagtatgatagacaggagcaagtggagtccagaaacattgtagagttggccttggcagctgcctaggaagggaaatgaaagtgctgtgggtcagagtgacacaggttttgagcgcagagaaatgactagccacagtagtgatgccattaataggaatatgttaacatcaggacttggagcagattgtgtggcgtgtaaaatgagtgctgttttggataggttaattttttgataccaactctgagtcttgatagaaacagccaaaagatggggagaactggggactgggactgtgaagacaggtatgagcatggagatataaatttgaaattatccttatagaaaattgtagtataattccaatggtgagtggggttaccatcatccagagagagccagtggagctgtgttacaggagggtggcagaagctgcagggacagagacaactgtcagagaggtggagaaactgggagagtgtacggtattggaagccacgaggtgagagttttcaaaaggcatgtgactaacagcatggcctccacagagaaagttgataaccccgacagaaggccactggagttgaccattaggcatcgtgcaggtgccagcatgccagggacttgcaaattgatgagaagctgttttgggcttctggaaccaagtatgggaggagagaagttagtggcataaagtgccagaggagacaacagaggacaggattagctttggcaaggatgtctggcagtttaactcttgacaacagcacaggcattttccaacagaggggaaagaatttgaggaagctcccatcagatgagggcgagacccagaaagatgacaggagacaatgtggagaggaaaactctgagccgtatgaaatggccactgaggaaactgagaaatgttccagatgttaagagcctgcaaggatgccatggcaggtggtatggacttcagaggagagagtgcctagtgacaacctggagtatccagtctgtgcccagcccttgccatgggcccctgaaacagaggtgtgggagaaggggcagtgatcagtaaagtcatttggagaaaagggccaagactagccaaggggctcaggatttccgaatgcgtatgaagagctgttgtttccagcagagaggactgggtctacggaaagtaagctggaatcaggtagtgatcaaagcaggaagaggggacacagtggtgacatgggtaacatcctgctttacctgtgtttggcaccttgcaatttgcaaagtgtttttccatatattatctaatttaatgcttaaaattaccctgggagattgatagccctattctaaagttgacaaaacggaggcacgtaagtgtgatatgttgagtatcctctatgagctaggactaaaaccgatggcttggaactttacctccagtgtcattcctgctcccctaagagcagtcaccaagaggctgaaaggcaggcaatggcaggtggcacacaatggcagcagcgagggcagagtgtccaaaaggcaaaatcgcagactccatagcagagggggcaaaccggcagtcctggtagggaggtggggccagcagttcacagctgtgttttatttggccagcacaggtttttggggttgcttttggccttttgttttattttcattgaattcaattgcccggggcagggcatgttctctctagtttgccacaggccccaccattcctcactaattacacccagccccatctcccgctgctcttgtgtttacaacccctcacctgcagggttgtcctcctgctccactcttcaccaaggtttctgttgttcctgatttattctttctggagtataactttggaactataatctttaaattcactgaaaatgattttactcctctgccaagctagattattaaccattactggttagaaaaatatgtttaaaattatgacaaatggatgatagaatgtaaatgaaacattttttaaagtgcttgtgatactaattcttcatgaatgttgactactcaatctaaattcatgtcttatccttttacatctctttacatattcactcagctcgtaatagattctgataccattttgaagctacttgaattaatttattagcccccaagtagcttggtactttgaattctgattttttttcaatgcagaagaagcaaaataaaaaggtaggaaaaaacataggtaaagcattttatgaaccataaaaactgcaggcgttagtaagcttgttttgctaatctatgatagaacacatgaaaatttttcatctcaggaatgtcagatgcacacctgatatccagtgtatcaaagtttttcgggactgacatcagaggctctcatgttcttgaggaaagcagacagacttctaccccagttgtctctttgctcttctccagattttggatgatttccagcagctctgctgcatttaataagtaaattcagaaactctgggcagaactccaaaatttgaggttttgcttaagttctctttatttgtgggtttgtttcaacttctaaaaaatctggctgggaaactggtacaatatatttcagttacagcaataatatataagtaatactgtttgacaagttgttgtaatttttagaatttttgatctacaactatcagaaatataaatttggttaatcttagatgtaccaaatggtattgaaatatgatagtgaaacttatttattctaccactagttaacttttcatgtatagggtgatgtccatataagtatctatactgaaaaactaaacatttactttgtacagttttataacttaaatgctaatctgtgggtgggaagtgtaagatatttgaaaacttttcctatcttttagaaggttttaagttaacattaaaattttggtagaaattggattttactattaacatcctggttattactgttctttttgtttttttacttttaaaataaagttttcaggagaaaaaaatactatttgttatataatggatagcatttaacatttaatatgaatgtcaaatattttaaaccacaactaatactgtggcagcctcaggaatttgtgcagttgctattagggatttatttttcccctcacaaaaatagactcaaataaatgacaaatcaaaagtctcaacaattaaactcaagaagattattaacataatagtagaagttaatttgcaagataatccatatctttttgtagggtaacagggtttatgtggaaacagcagtatgcctggcttccagggttgcacacaatactcagcaccatctccaagtctccaagtgctgatgaccaaagtaaataattatttacaccagttatgggaaattagcaaataaataggtaattaagaagtgaaagtaagagcagtttcaaaatcagaatgttaatatcccaaggtgaattttcattaggtctttatcacctagaaataaaattctagttgattttcttattcagtgttaaggcataaacataactattggctataagtggaacaaaaatgcttaaactctgtcctaaacctggacttcatttcttaataaagtacgttcacaaatgtcctgggacctgcttctcagcgggtcacagaagcacttgataagcttacaagtcctgaatttcaaagtattccttttaagtgaatttttttaaaacatacgaaagctagccaccacataaaaggaaagaagaaaatattgtccttagttttctaccttatcaaagatacagatgaacatggttcattctctttgaaagttttaaattttgccttgcgtgcagagccactgttgttgttcccccctcacacgcataaaccagtgtacgtgaatcctaacttgccaatacctcagagataggaaaatatattttgatgtacagacgctttatgggcttgtgctggaaggtcacgtgccttagtggtcatgagatcctggtgcaaagtggatagaaagtgcttctttgtatgcagcgtcctccccttcgtagatggccagttcccccgaatgtctttaatatctgaacttgagaatgaggatgttgatttctaattctagccccaacctagattgtctatggctcttcagttatcctggaaaatcaaaatatattttactatcttgaagtattggcaagttaggattcataaacacttggatgaccagccacaaggcaatgtggcattgtggttaagaggcaggctttggaaacagacagacctaagttgaataccaccccttctctgcctttttttattgtgtccatgggcaagtgattcagcctccagtgttcagtttcctcatctgtaaaatgagaatgatataacagttatgtcataatattggtgtcagggttaagtgaactagtctgtgcaaagtgtatgataagacacatctgataaatagttgttctttgtgtatgtatgtgtacaagtatttgccagtagacagctgccatatttattcataaatgcaattaattgagatttagtatctaacctcaaaatcagtatatgactttacctgccaagatgctaaagttgttttccatcctggaaatttacatgtctgttttccttaacacagttccaaaggatggcctcaaaagccaggctgcatttgaagaaatgaggacaaattacatcaaagaactgaggaagatggtaactaagtgtcccaacaattctgggcagagctggcagaggttctaccaactgaccaagctgctggactccatgcatgacgtgagtagagcccctccttggttcctaagtgaaggatcagcaaccacatacacactgctgaccaaaggaaacagagactgagagttttcagggtgtcatgctagacctctgttgactccattaaggatatcgccatgtccaaggggctgaagaagagacccagagccagggaatgagacatagggtttattgggtacttacatacaggatgggccaagagtagtgccagaaaaccactcccatttataaaaagcattcaggttatatagcattttcgcctagcaacctccatgtaacccatgacaaagggcctcgatcccctggacgacctgcattccaaagaatgggccagggattcggatgtcctctatagattaggagtgaatctccaggttggccactctcagattccttagcttagaactccgaacacatattcttcttaaaccatagggttattctcagggtatgcttgagttattgctgtcaggtgcatctgccatacacagggctttgggaagaatcagagtaaatcatctgatagaaagcagcaagagttaaaaactgattaaggaattttttttttttcaaataacctttggaacaaacctcatttgcagcagagagtatgccctggaccagggaaggccctcagatttgctacaggtgtcagattgagtttcacatttttgcttgcaatttaggaaatgtttggttaataaaaatgtttgctttaacattgcataaatagtgtccatcttctacaactgttaatctaataacccaatctttcaaaaacattattagtggttcagggccagcctggatcatctcaatctttgccaacttttgagtcttatattcattattcttcataggagtcacctttcttgtcttgtgtcaatacagaaaggagattctaagcttgtttctaatttaatcaattatagatatagccgaggtggttttagcagtttctacaaaatattgatttggataacttgctttgtatgtcatttaaaatatgcttcttgttttattttgcaagcagcttctccaattccggctcaaacgatgttgtacgcagtcatgctaatttagttcttcatatttgtgaagtttccatactttcttttggagaatttattgcccaagttcatcctgtaagatctgagtaggaaactcttttaaaaatatttttctattaaggaaaatgttgacaggcatcattgatgaccagtattataatggtattattatggaaataatggtccatcttttagaaattccattatgccagcggaatgttatctctctgtggtaactaatggcataaggttgattgataaaagaatgtcactttccagtgttttacactgagaccctgtgcatatcatttacctctgctttatctgaacttttcatatgacagaagtcaaattcccacaaggcgaactcagtgataaatagttttgctaattgtcagtggcttaaagagtgtgacttagtggaaaatcttagaaataagagatgatggcaagcaaggctttggggaacacagcaaattatgctcttcatgactcacacaaaaggaaatgcagggaactggagcaaagtcttcccactccttttatgttgaaaccacagatcatctacatgagaacacatagcagatttactttcgtctgttaatttcattgaaaggccctctgagtagagaatagaatggaggttttgtggttctttcgtaagttctcttatttgtacagttaggcacaagtgcaatatcaaaattcatgtgattatagatgaaacattctgaaacaatttccatgtaatgaggcttacaacagaagttaaacttggtttttcaaaagccctttggaattgacttttcttaagcagcatagcacaatggaaacactaaggcctcacctagtggtccatgggtcaaaacctcctttgctagtttttttttttcccccaccagcacagtgcttggcatagataggaactcaatgaatagttttttgaacggctgtatcataaatgctgattttatgcaaagtttcccaaagtaaattagtgtctgtgggggtttcttaattgaggtataactgatatagaataaactgaacaaatttaaagtccacaattttataagttttgacttctatgcacacctgtgaaattatcaccacaatcaagatagcgaatatatctatcaccccagaagttttctccagccttccttcaatctttccacctacactccttctcctcaattactttctatatcgctctgtgaatcgagattagtttgcattttctggtgttacatataaatacaacaatgcagtatgtagtcttttttggtctggcttccttcacttagcatagtaacgttgagattcactcattccatttcatatataaataatttgtcgtgtttttcttattgcaaagtagtttcccattgtatggattttcccccaattaatttgtgcagtcacctattgatggttgtttgggttgttaccagcttggaggctattacaaataaagccatgctgaacctttatgtacaagtctttgtacagacatatactttctcctttcttggatgaatgccttgtagtagaatacctgggtaatatggcaggtatattttcatattttaagaaactgccaaatggttttccaaaatggttgaacaatttactgttcccacaagaagcatatgaggttcagattgctccatacccttgccaactcttggcgtggttagtcggtttactttcagccattctaatagctgcatagtggtatcttactgtggttttcacttacgaaaagattgatgatggtgaacatcttttcatatgctcatttatctttatatcttctttggtgaagtgcctgttcaactctttggctcatttttcataattggataatttgttttctgactgctgagttttgagggttctttatattttctggatacaaatccagatatatgactgtaagtattttctcccagcgtggctgatcttttcattctcttagcaatgtcttttgaagagcaggagtttgtaattttaacgaagtccagttgatgattgttttctgtatgggtcgtgctttcagggctgtatctgagaagccctagtgtaagccagtgtcatggagcttttctctatgtttccttctagcattactatccttcactgatagcctgtgtcttggaaatcattttttcatggtctttattttgagaacttttggttgtttcaaatggaagggtagtttcagttcatctcactccaccttggctggaagaagaataccacttctttagaatcattagaatcattttaattctaaaagctttattttgaaatatcaaaaatgtttgatcttaaagggggcctgacagaagcatcttgaatactctatttatattcctattccaaacagagcattgaaaaatgcattttaagtctagagggacctttctaacattcacacttactcagacttgagactgcctacagctttttcattagagtaaattagtgaatcaacagttgtggaattttcttcaagggaacaaagaactacacaatgcgctggctctatactcagagcctagttctgatcaccttgtggaaaaaagagcatttgtttctaagggtcacacacataagaacctttgactgtagatcaaagttctgcttaaaccatgtgtgtagtatgccagctctcaggacacatccacgccgctctcaggacacacatggatttcttccacatggtacacatatgtgctggaataatggtcccaaggtgggtgaaaggaacattctctgaaagaacaggttgatagttgagtgtttgaatcagttaacaactttaatgaatcataagtcctctgaatgtcaatctttccccaaaaaaatatttcaaacaaagcagctgtggtaaggatactaggagtaaatgtagttttgcattgtaaatgtttaggtgtcatatgtaaagcatatagaatccttactctactagaaagaattgacaataataattttttagctcttactaaggatagcaatttcctatgagggaaagaagcttatttctaatgaatttattgctaacttctattcattcttagagagatcaaggactatttatgttatggtaattgtgtagaacagtaagtaacaaagatgatattaatagtacctcttgatgcaaaaattgcccttttcctattaaacatatgttgtaattttatgtcagtatacacacttagtaaaaatgtgcctcctgcctagcagtatagacagtgctgcagaggataacaataaataagatagcaacctgacccctgataaatagtgtgcatagtgtgccagccctcaggacacatgcacacaactttcgggacatacatggatttcttccacatggtacgcatatgtgttggtagaatggtaaataagcttagtttacagaggtgactggagcataatgcaaggtagaaagtaatcaggtattcaaaccagttccctggatggtgggacccttgagagcatgtatgtttatatactgatctgctggtgagcccttgccacattcccaggaccagtgggccaatgcaaacagaaagtctgtccttagtaatcgatagaggacgatattcatctcattcaacaaatacttgagtgtctaaaagtgccaggcagtgtcataggagggagacacccccagacagggcagccagacagcacctggaggtcacagggcagcatgctgggacctccgaggaggtggagttgtgggctcactgacacttattctacattggtaccaagccttgtgaagaaagtggaggagctgtgctgggcaggagtcatggaaaacttccaagggggcatcagaggatccttatttaatggaagaagaaacagccccacagaatgatttcttaaggttcctagatagctggtggcagccagaacttccttgactcactgctgagtgctccggacgctgccattatgaggagagaacacttgtggctgatagcagctgctcgtttttaggctgggctgcatttcagagatcagaaaaccatcatataggaatgttagggacagctgcaccaccctccggcgctccagatttgtttgcatcttccctggcacgttctggaattcatcgtttctgtgaggtgcagggttacatcttgaaggcagtcaaccttgttttgtattaaaacatcatgtgtgtgtagcagatcccaaaacaaaatgttagttggcctcaacatgagctgagcaggccttggcttggaggcgtttgcttctgtgtacgaccattagacctggatgggaacctacccctggggtgggtgggggtcagtgtgtcactcagatgctcttctctgcacgacagaaggaaggcctctgaggatcccattgctgaatagctgctttctgtgtctccaggggccatgctagaagctgacgtggctcttctctagccaggctctgggagccatggcttccctgctccaagaggggcaaggtgggtagtgtgaggaacagaaatctggtggtacagaaaatactacatgtacacactggggagatgtcattctttaggtcaaaagggcattaagtatcattgacatggctgggtgcagtggctcccagctgtaatcccagtactttgggaggtggaggtgggcagatcacttgaggtgaggagttagagaccagcccagccaacatggtgaaaccccatctctactaaaaatacaaaattagccgggtgtggtgatgcgtgcctgtagtaccagctacttgggaggctgaggtgagaagattgtttgagcccaggaggcagaggctgcagtgagacaagattgcaccactgcactccagcctggatgacagagcaatacctgtctcaaataaaaaaaacaaaaaacaaaaaacagtcagtgacacaataaccacaaatgacatactgctacaagcagcagagactgttcacaaattattattatttttattttttattttactttaagttctgggatacatgtgcagaatgtgctggtttgttatgtaggtatacatgtgccatggtggtttgctgcacctatcaacccatcatctaggttttaagccccacatgcattaggtgtttgtcctaatgctctccctccccttgtccctgacctccaaataggccccggtttgtgttgtgcccctccctgtgtccatgtgtttttattgttcacctcccacttatgagtgagaacatgtagtgtttgcttttctgttcctgtattagtttgctgagaatgatggcttccagcttcatccatgtccctgcaaaggacatgaactcatccttttttatagctgtgtagtattcgatggtgtttatgtgccacattttctttacccagcctatcaatgatgggcatttgggttggttccaagtctttgctgtcgtaaatagtgttgcaataaatatacgtgtgcatgcatctttatggtagaatgatttataatcctttgggtatatacccagtaatgggattgctgagtcaaatggtatttctggttctagattcttgaggaatcaccacactgtcttccacaatggttgaactaaattacattcccaccaacagtgtaaaagcattcctatttctccacagcctcaccagcatttattgtttcctgactttttaataattgccattctgactggcgtgagatggtatctcatcgtggtttttatttgcatttctctaatgagcagtgatgatgagctttttttcatgtttgctggctgcataaatgtcttttgagaagggtctttgcccactttttgatggggtttttggttttttttcttgtaaatttgtttaagttccttgtagattctggatattagacctttgtcagatgggtagattgcaaaaattttctcccattctgtaggtcacctgttcagtctgataatagtttctattgatgtgcagaagctctttagcgtgattaaatctcatttgtcaattttggcttttgttgccattgctttaggtgttttactcatgaaatctttgcccatgcctatgtcctgcaaggtattgcctaggttttcttctagggtttttatggttttaggttttacgtttaagtctttaatccatcttgagttgatttttgtataaggtgtaaggaaggggtccagtttcagttttctgcatatgcctagccagttttcctagcaccatttactaaatagggaatcctttccccattgcttgtttttgtcaggttggtcaaaagatggttgtagatgtgcagtgttatttctgaggtttctgttctgttccattggtctatatatctgttttggtaccagtaccatgctgttttggttactgtagccttgtagtatagtttgaattcaggcagcataatgcctccaacttttttcttttttcttagtattgtcttggctatacgggctcttttttggttccatatgaaatttaaattagttttttctaattctgcaaagacagtcaatggtagcttaatgggaataacactgaatctataaattattttggggagtatggccattttcacaatattggttcttcctatccatgagcatggaatgtttttccgtttgtttgtgtcctctcttattttcttgagcagtggtttgtagttctccttgaagatgtccttcacatcccttgtaagatgtattcctaggtattttattctctttgtagcagttgtaaatgggagttcattcatgatttggctctttgcttgcctattgttggtgtatggcaatgcttgtgatttttgcacatttattttatatcctgagactttgctgaagttgcttatcagcttaaggagattttggctgagatgatggggttttctaaatatagaatcatgtcatctgcaaacagtgacaatttgacttcctcacttcctatttgaataccctttatatctttctcttgccagaacttccagtactatgtagaataggagtggtgagagagggcatccttgtcttgtgccagttttcaaagggaatccttccagcttttgcccattcagtatgatattggctgtgggtttgtcataaatagttcttattattttgagatatgttccatcaatacctagtttattgagagtttttaacatgaagggatgttgaattttatcgaaggccttttctgcatctattgggataatcatgtggtttttgtctttggttctgtttatgtgatggattatgtttattgatttgtgtatgtcgaaccagccttgcatcccagggatgaagccaacttgatcgtggtggataagctttttgatgtactgctggattcggtttgctagtattttattgaggattttcacatcgatgttcctcagggatatttgcctgaagttttctttttttgttgtgtctctgccaggttttggtatcaggatgatgctggcctcataaaaatgagttacagaggattccctctttttctattgtttgaaatagtttcagaaggaatggtactagctcctctttgtacctcccgtagaattcggctgtgaatccgtctagtcctgggctttttttggttggtaggctattaattactgcctcaatttcagaactagttattggtctattcagggattcaatatagtcttgagaaggtatatgtgtccaggaatgtatccatttcttctagattttctagtttatttgtatagaggtgtttatagtattctctgatggtagtttgtatttttgtgggatcagtggtgatgtcccctttattattttttattcacacattattttgagagagtcatagttcatataattagtgggtgcttttgcatctcgctgtggtcctggtaatttccctcaggatcacactagaggggacttagagggagacacaaacctactttaaacctcatatggaagaatggaagctgcacatttggctatgtccaccatttacttggatagcccactcacttcatattttattctgtcttatatctttccactcaggcaaagtttctcctcaggaaatgttctgaggccaaaatagaagcctgccatggaaatgagaccactgcggacaacagaaagagtgtggcctctggtgctaggttgccctttctttcagccatcttggtgctttacttcagtttttggctttcggtttcttcaactgtaaggcagtaataatacccatcttgtaggaagtttggggaagtgaatgaaataacacaagaaccaagacatctaccacataacaggcactgaacaaatgttcaccctctcttcctgttgctcaggtgacaatgaaataaggctacttgcttctatgtctgtaataaagtacccagagctggtagtaccatgaatgtgtatgtaagagacatcgagagatcgagattcaaagccacattctctctcaccaagctaaactatttattataattgttagcggtgttatgctgctttcttctttgacaaggccatgactaagaaggctctaagtaaaggaagaatcatttattccatagtcagctaactggtagcaaagccttctcttccaagacaccaagggagaggggaggacataaattatgcaaaaaaaaaaaaaaaaaaaaccaaaccaaaacacaaaaaaacaaacaaatctcactctttttgaaaaggacatcttcataggtgtaaagatttcaaattaaatgaataactgacatgggagatcttactcattgcctagtgggtaatggaacaattgctaagggcttacattatctctataatgattactaagggcttacagtgagaggtggtggagccaagtttgaattcctaaagtagataagagctggcaattacatttacaaatttcttctttcacaaggatagcctagttcagaatacattgctctggctgacttgtgccaatggatgcttattttcatataaagcatctttatatttgtataattgggaaaatgcaacaaatataattaataatgggtggtaaataggaaataataggtgaaaatgtgatttcagcgtgaaggaaaagcatggcctagatgccttgaggtgtggtatggggaggtctggacaagccaaggactggtgtctgttacatgcctgcagctggggccgtggagtctgactggaatatgtaactccgcgtagaggtagaaagggcatccttatgtgttccttcttcggtcaccacattaatggtttaagggcagcatcaatcagtggccatggttgtatctctcggagctcccctagggtttggaataggttcatagagcgagaggcagcagaattgctcagtgactgtttctctcaaacttgttggaaagaggcttttcataaccagaacgctacattaaaaaagagatttttcagtgtccagttgttattcactctgtgaaacgagccatctctgtcagttacccttctaaacagcctctacgggtacgtgcaaagaaagggctactgagtggccctgcttcccggagggagggcctggcttttgggccgtgagtctactggcaggggaggcacacgtggtagcctctaccatgccaggcacagcacaggcactatggatacaacaaccacatgagagacctggggcctatgtcctctgtgaggacagagcttgcagtctgatggggaatatagacacctaaactggattgaaaacccggcatgaaaggtggtgtgatacggagtgtcaggaccacgggtggagtatctggaaagggaagtggcagggtagagaaggggccatggcatgaggcaagggaaaagactgcttagctgcgacccaaaagtcaagtcggggtttgccacatagatggaagctattctaagccaaaggagttaacatcccaagggagggagaagcatgctgattttgagaaatagagaatgtccttgtatccaagagagccatgggacgaatggagagaaagaggagggagacagtgatggaatccgtaagccaggtctaggaagctgttgaggcattttcaccacatctgtagagaatctggagctgatctgtccaacgccatttccaccgtcgtgtggggctctttacatttaaattaagtaaaatggaaaatgagtctcctgaacacactagctgcatttcaggtgccccacagccacatgtggctagttgccaccattctgtttataatgacaacagaaagctgtgcagaaggttgtgctgaatggtgctgtctgacagattctagaggatccaggaggggcaggaggcagcgtcccagttgggatgctggtgctgtggttcaggtgagagctggtagagccaagctggggcaggagcaccaagagaggttcaggtggtggaatgatgactcctggtgatgaaagggatggggaggttgagagaggagagagcaagtcaaagagaactccccagagttggaagtagatagctgggcaaggtagcacctgcccagaggagggggctcagggccaggagatctgggaggggggatgaagagcttgtttaggacgtacaggatttgaaagacctttaggacattctggaggaaatagcaggtagacactgagttctgtggatcaaggtgaggaaggcagcctgctgctgcagatgtgggaggcggcagcatgtgagtggtcactgaagctgggagtggatggaactgcccagctgttggtgcagctcaagaagagggcacagaacggaagagggtccagaggaaacactgtggtcaaatggggaggtggctgcaaaaagtctgggaaagcgctgctgctaaaggaagaaaaggaggcagaatggggacattcaggacaagccagaaaagagagtgtgtgccccattttgccaacgaggggcctgaggggaagaagctgcagaaaggtcagttagcaaatggcctgaacaactttcagtagccatagcaactgggaggtggttgtgaagaatagtggatcgactcaaggcatggtaatgctcacggggtttccagtatctatattagaagccacaaagcaaacagggacagcagtccattttttttttttaatattgagagtgttgtccagcaaagctccttagtaaaattgccttaataaatagaagagaatgatggctctttctgttaaatggtgggatgtatgtaagtgagcagttcgaatgtggttgagagaatatacaatgtctttgtgtttatatgtttaagcctggctaagaaatcccatcagcttaacaagcctatctttgtaaataatcccgaaactctattccagaccatggctggctttattatgtactgtatgcatatatgtgtatatatgtgaggatgtgtatatatcacacatgtgaagagttcagcatcaaaggcagctatgaggcttctgagctgatcttcttttttaagtcatgatttagttcaatgatgcaggtcctgaacccttcctctcccatcactttcacattacaccttaattatgattgttcatttccacttgcagccacagaacctctatcttcttcagtctttcgtgcttgatcatagctttcgtggctgacttaatgcaaaacctgggtaatatacttacctctttcaagaaggttaatgttttcccagcggctggtttttagacaattcatagtgcttaccaacagttggtcaacagccaggcaacattttaagatgcaattgtactatgttttacagaaatgagaagggggaatgtccacataggagtttatgcttttttattattttatttttaattgtaaaatacacaagcataaaatgtaccatgttaaccgtttttcagtgtacagtgtgggtgttgagtacattcacattgttgtgcaaccaatttccagagctctttgtcctgcaaaactaaaactcccccttcccctctttctgtctctatgaatttgactactgggagtagctcatgtgaggagacatacagtatttgtctttttatgactggctcatttcacttagcataatgtcctccaagttcgtccatgttgcagcagatgtcagagttactccctttataaggctgaataatatttcattgtatgtatacaccacactgtgtttgcctgctaatctgtcaagagacatttgggttgccaccttttgcctattgtgaatagtgctgctatgaacatggatgtataaatatctctttgagactctgctttcaattcttttaggaatattcccagaaactggattgctggatcatataattctgcatttatttttttgaggaaacaccgaacttttccacagcagatacaccatttttcattgctaacaacagtgaacaaggattctaatttctccacatccttgtgatcacttgttattttctgggatttctttttagtgctcatcttcatgcttgtgaagtggtaactcattgtagttttgatttgcatttccctgattagtgatgttgaatacctttccaggcgctaatggccatttgtaagtcttctttgaagaaacgtctttcaagtctttgccccattttatcaattttttgtttttttgttgttgagctgtaggagttctttatatattctgtacattggccccttatccaatctatgatttgcaaatattttctcccattctctgtttttgtttgttttcacttcgtttgttttggtgccaagatcgtctttctcttatgaatttataatgacaacagaaaatcgtctgtttcttttaatccttaactggcaaaaattaaaagcggtgtttgatctcagtttatttaaagaagggaaaaaagtatttttcttatgatcaccagctcctcgtgcttcatcattgatatttcacaggttacaaacccatagaacatgtgcctgtgttcacagctagttttgaagacttataagcaagtaattttctgtaagaacactgcagaaaaactaggatcttgcctcattatgggaggaaatcaggcattccattcccacctgactgcgagatttgtgctgccacagggtgatctttctggaaaaaacaaaaattttagggagaaaaaaaccactgaaggtcctacaggctatgtttctagaagatcacatctaaatcaaacctgacacacaggaatcttttcctgatctgaaatatatctaggggagattttgggaaactatcttattgtctaacacctgtgtcaataaatcccccgctcctatgcagctcaaatccctcttcttacaatataataataactgtgtaatacctgggatttacatagtgtctttctttctaagtcctgtcattaaatccttctaatgtttccatgaggtgaggatgagtaaatattactatttaaacttaatcaccctcctgtcttaattcctttctctataaaaagaaaataatagtaatgcttacttggattatttttatcctttttatagagaaaggaattaagatggggtgattaaatgcattttcacgggctcataaatgaggcaggagggaaagaagcacctgagggagccatcaggtggctcctgtgggtggcagcccagccctccacctgggtagctccattgctgataggttaggtgtcactctgggcttatccataaagtgggcatctccagggccaagtgtcatgggggtgtggccttgcagtcccactcttggcataatattctgctgctcccatctggaaattcttaataaactttgaacgagggaccccttatgttcattttgcacagggccccaccaattacgcagttacgcagcctggcctaggcataatataatctgtttaagattgtgtttgtcagaattcagcctgcagtacagcttgcaatgggtagaacaccttgcaggtgtggccagggaagaagacagcagagataggaaagacaaaaagtttgggtggagcagtacataagaattcaggcagacaagggactcactgatatgctataaaaaaggaacttttaaacccagggcctaatttgatacaaaaaggaaatagtgaaggaatttcataaggagtgagacactcttaagcaatagagaaatgttattgtcagtgtcattataaaatagaggagatagttttaaatgattgatatttaaaaggctaggaagatgccaattgaccaattaagtttatcaaggtcataaagggactagaaagtatatgtgggttaaactgcagacagtcaatactcatcattctcagattttgtatttacaacttcacctactcactaaaatgtatttgtagccctaaaatcaatgctcagggcacttttgcaggcattcccagatgtgcagagcagtgaaaaatgcctgtcaccaatgtgcatgttcctggcaaggtcaaacaaggtgactctgctctcttgtttcagctctaatgccgtaaatactcatcctttttgaggtctactgcatgccatgtttttttttgcatttttgtgcattttgttggtgagtctactgttgagatggcccacaagcatagagccccagtgctgtctatgttcctaagtgcaagaaaactatgacgtggcttatggagaaaatatgtgtgttaaagaagcatccttcaggcctgagttacagtgctattggccatgagttcaatgttagggaattggcagtatacattaaataagatgtctttaaacagaaacatgcataaaacaaggttatatattggtcatttgttgaaaaagttgcgaccagcaatgtaaccgtaataggttattgcctgatgcacacagcaagtcaatacaccaagacactggattgcagcagagaggtttaatcagagtcacaccaaaagaggagatgggaggaaacctcaaatccatctccccaggagtttggggcaggggtttttaagggcttgggagtgggcggaagtgtggaggtcattgattggtcgaagagtacagggggaagtcgctgaacagggagatgaagaagccatattctcatgctgatcctgttcctctgtgggagtcttcaaaccggttgcaggaattcagggtctgaaaaacatcttaagccaggggtgtccagtcttttggcttccctgggccacattggaagaagaattgtcttgggctgcacataaaatacactaacactagcgacagctgatgagcttaaaaaaaaaaaaaaaaacaaaaaaaaacgcaaaaaagtctcatcatgttttaagaaagtttatgaatttgtgttgggccgcattcaaagccgtcctgggccacatacagcccgtgggccatgggttggacaggacaggcttgtcttaagcgatccttaaacaaaagcctttgattctagtgtcaagagatcctgtctgtatggtcagtatctaatgctatgtgacttttagcaagtaggaagtgggccaaagtgcagcacgattaatacttaattataactatatttctttccagaacctggcgtgcaattcttgtcaaccctacaggggcagctcagcagcttgtgggaacctaaccctgtatttcccctaggagcaattgttcagtattcgttaaatcagtgttcaggtgactttgtaagacagttagctaccatggatatcgaggatcgactgtgaatatatgtaacccccaggaaatgtaggcttaaagggaaatgactcctgaaggaacagccaaaaatgtgagacatgtatgacagaggttgtctatttgaatgacaaattctggaacctttaagttgcatgacgtcttcggttacctagccttatgcccataggtgctaggattctttctaaggcgtttcctaaaggctagaagaatctgtatggtaagaggaaagccagatctaagtaccaccatatcacttaatttggagacctcttttccccaacgttttagtagttttgaaaactactaaatcctaaataagatggagacattgtatacttgatttatatattttaacaaacaaaacctgttcgttcaaaagctgttattgaatctgtgagatgccttccaatccatgggtcagcgaacttctgtagtgcgccacgtagtaactagtttaggctctgtgggccacacaatcttggttacagctactcagctgtgccactgtagcatgacagcagtcacaggatatatgtgaatgaatgaatgagtgtggccgcattctaaacaatttcataacatatgaacatgtcacaaaatattattctttggattttttttcagtcatttaaaagtataaaaaacacaaacatggaaaaaacttaaaagcatgaggccagatttgacctgcaactgtagtttgccagaccgtttgctttttgtggcatcatagaatcaagagaagagaacagtccttatctattgccttgagacaccttgatctcacctgttcttacctaaggctgcctctggccactagggtctgccccttattgcttggtgttccttttttggggagattgaagtaaggatttaactgcctaatctagattaaacctaatgttaaagttggtaacatataaacacaagtcagctcagatttttactttgctcagcatagtgtacatttgcaagaaggatctaggaaatattgaaaacaagattaggaaaagttcatacttctatatacagtaacatgccaatgcatttcaaacaccaccctttcattacatttcctttgttcagcaaggttctaattacccctttatctgtaagctccactttcttcttttccattgtgtcatttttctctgtgtttttcacatgtacaatagaccttattctcaagaaggcagagctgtggtctagaatgaggcttttaatacaaggaaacgttaaggtggaaattaaataaaattaaacaaaaaaattagaagtaaattgagcccatcttgcttagcacagcatccaaaaacatgatttaaggatttaatattcacccctgaccagagatcagtgattggtgttaaatttgttataaaaatggggatgaagaacaaattaaaacacagtctcaataacaatcagatgctaatggatgggggccgggatgagttttcagaaatgaccttgatttctcatgagacactgtagcacctactccacccctccaccctcccatcccagccagcccattcctgggcaggcactggacagacccagactgcctgagcctgcaccagtctagactctggaaccagccctgggaggctgcatgggacaaccctgcctctgtcactccatcagcgtcactaagcttccctctaaggtccccaaatgcctctcacgtgcctagcatttagctgctgcaccgagcatgctcactgacaaacttttggccaagaagagccttttggtctctcttggtcagatctaggagggcttcaggactctccaaaactcacccactcagagagcctgccaggaacactcagctgagcgatggcattgtggagcctgggttttcagaagggagcccatagtgagtggtagcataaccttgttaaggttgtattttccttagatatagaaacaaatcaaatgctgctaaattggtaagggatggagttttcatatcacgtcacattttgctgagccgtaaccagacagggaaaaagcagagccacatggctcaggggcccatctgggcacaagcgggcagcttccctttcagcctgcactgggagcaggttgggggtttagaatctgttttttcaaaattaatatttattgtggaatatacatagctcacagtttaccattttatccattttaagtgtacaattcagtggtattaggtccattcacatagttgtgcaaccatcaccaccatccatcacagaaattatgccccttaaacactaacttcctttcccctactcctggtaagcactattctgctttgtttctatgaatttggctactctaggtacctcatgtaagtggaatcatatagtatttgttcttttttatctggctcatttcacttagttaatgtttttgaggttcatggtgctgtagcatgtatcagaatttcatttctttttgaggctgaataatagctctctgtgtatgccacatttcgttaatctgtggatggaccttttgagctgttttcacctttcggaattgtgaataatgctgctgtgaacatattttgttttttttttgtttttttgttttttttgtttttttttttgagatggagttttgctcttgttgcccaggctggagtgcagtggcgcaatctcggctcactgcaacctccgcctcccgggttcaagcgattctcctacctcagcttcccgagtaactgggattacaggcatccatcaccacacccggctaattttttgtatttttagtagagactgggtttcaccatgttggccaggctggtctcaaattcctgatctcaggtggtccacccacctcagcctcccaaagtgctaggattacaggcgtgggccccatgcccagctgtgaacacttatgtacaaatatctatttgagcacttgctttcagttcttttgggtatatgcccagaagtggaatggtgtgtcatatggcaattctctgtttaatctctttaggaactgtcatactgtcctccaaagcactgcaccattatacattttcaccagtgacatgcaaatgttccaatttctctatatccttgtcaacacttgttattttccactgttttttgaatgcctgttatttcccccttttttgataatagccatcctaatgggtgtgaaatgctatctcattgcagttttagttttgatttgcatttctctgatgactggagatgtcaagcatctcttcttgtatcttgtaaagatacatttgtgtatcttctttggagaaatggctttggcaagtcctttatcaatttttttattcagtttggtttgttgttgagttgtagttgttctttatctattctgaatattaacctcttttcagatatatgactgaaaatatcttctcccattctttggcttgccttttaactgtcttgatggtggccttggatgcacagtttttaattttgatctacttgtatttatcttttttcctttcattgcctatgtttttggtgccatatccaagaataacactgttttgtttcagataaaggccaaacttcttatataatcactgcaggtcattttcccatattcacaaggctatttctggaacacctggactttataaagacttgccagtcatttgtgtccagtgaaactactagcgttggagtatttatagttgagttgatgtatcttttgccctaaccccaacatatcgctgactaaaattttgatctttgaaaataaagtttccaatatcccccgccccaatgctcattttaggcaaaagctcactccaattaggtagacattctggagtcaacagataacatataagaaatgagcacgctattgaagtcatgtgggacctactttagagaggctgtatcattcaggcttcatcaccacttaagtgactgtgtaacctcagaacagcagcagtggccccagatgtgcagcaaggaggagactctccctgcaaggccttctgagaagccttcctttgcgagcagggagagcggggagtggccgctggcctgccccagcaatgacttgtgagggtagtatggaaaaggcagattgagccccacggcctcattgtcagagcgagccaagtgccatcagttgccctgtgaccttgccaggctcctcttccaccctgacagctgtggcccatcaggctggaaaaatcatgctgggcatctgctaaacttctgagatcccagcagatgaattctgtacagaatgaaaagtcaatgcataaatcttcctctgatttctaacaatgcgggactcttattgctgattgtaattagggttcttgcctctccatctagcctgggatctaccaggaaaggccagtgggcatcagcattgagacagcaggccaggccatcattgcatttgactcattgcaatgaagtcactcatgctgacaagtaaaggtagagctttggcttcgtcgctatgaccaccctccccactccgaccccagggtctctaaccacagtgagcagagaatggggctcctagcacccctggcatggcacgcggatggagtcatgttaaaactcagcataaacaggctgaaggaaaccggagtctagggaaagatggaaaggagttagcttcatgtattgagttttgcaatattggtgccacaaaatgaagatgctcatttaggttgcccagtttttgttttggctcaatgaataaaactagcaacatgctaccctaaaaaatactgttgaaatgagtcattcccaagcactgggagcttggaataagtcagagaaacccaggagcgagaatccgggcaagagtagcttggaatccctttagccctcagcccacaccagggttgcacagcagaaacatgaaggggccacttctgggagccgtggggaataagacaggtgattcctccatcaaggagcttgcaggccgctgtttaaggagctgcaccgtaaataggacaggttaaacccataaagatgtggacagcaggttaaagagaaagtggggtcaccaggctccaaggctaattgttaagtaaatgagaaaaacaaaaaagtgtcatctgcgaggtgagagtccagaaagaactccttcaggctgggccccaggaaggcctgcggggaagaggtgactgcagagaaagaactggggaagcagctgctgcccacgagcatgacattttccaaaaatgattccatgccaagtgagtgtctgaggaaattgctggggcatccccgggagagctgtgcccacagtcattctgaagtaatttgctttgaaaggtggcctttgggatggtctggcttttccccccattccaaaactgacacatcctgatgaactgaactcttcttggtggtttcatgctttgcagtgggaatagtagtttgggttccaactagaaacggtgcttatttagagatgcacagcctggctcctaccctgcccagaatccccttccagggtgtgagttcagcctgccctgcctctatcagctctgtactggggacagtgtctgatgatgtacaagtgctttgtatgcatttgtatcctcatttcctggcttttttaggctcaggcaagggccaagtctgcatattcctcaatgtgtacccgtgcactacatcaggctggtacccaggaggtgcccacatgaatgtacagggtgactggtagatgctttgccgtaacacagcggtgtggcacaggaaccagtatctattctggctggtcagtatccatgctgacccagatgtttgatatgtgaatctcacccagctctcctggtcttgtgcccacctccttgagatctaaccacctgcagctgctaacttcacgcgcctggatttttccagttgagatggggctctgcactgtggcgcctccctaccttaaacatctgctaagggccaggcatctgtgggttctgccctgaaggcttccctggcccactggctgtagcaggccagggttgggggaaggctgtgcaggccagtgagcacacggagcccaggacctgcagctcagaccagcttggtcatgttctcctcgcccagtgactggggcccccgcttggattctcacagatgttccctgacatcagcaactgcagtcatggctcaggatttaggcctgcagaggttttcagccttgtcccagggcagggtgcgccagatgggcttctgtggccgccagcacttccggtagctgctgaggccttctgcacacccagccctgtgggcatcctagccgccccaacaacacaggctgagcccttttctggtagtagttggtggtgacaccacccccatccactggtgacatcatgcttacagagtcaaatgcccagcccccggctgccaggccaatgccacctgctggctctaatgccaggcccaggttatgcacgaaggtcccatccctctgcagctgaccgaggcataaacagaagccctcatgactggggatgagctgctttctctgtctgtggaacacggaacagaggtgggtgggaaatgccaaccccaggttaatatgcattgttattgagtagtgtctgggacacctgtccccagccaacctgtgaggaaaaacagccaagcccttaaccccagcccctctccgttctggttatctcagcatctcctgggtgatgctcaatgctgtggacatgtttatgtgggtgatagggacagaggctccgagagggcctaggacctccccctgttagcaggttcacagatgtgcctgggctgcatgctgcctcttgttcaagggtcgacttacttgttccttttcttagtacatatgtgtcagcgttgctgtcacctgtgtatcaatatgaacccttccatggccctgctgtataactttttggggatgtcagtcggtaggctggcaggcctctccactcttcaggaactccctaggtaaccctgcacttgctggtcccccaatggccatgcgaccttcaggtcatgtgccaagcccatctttcctgagagcccctctgaactgcacctcctcccttccctcgtcacactagcagcacctgcctttctgtgtgtatttctgcttagtagaaaagaacacagacgccttgagagatctgttcactgcagcttccccagtgcctggcacagagcaggtgctcggggacttagctggatagatggtgaggatgagttgtagataaaggacgctggccctccccaaaccctctgtggcctgagaacagggaacctttatccccagaacaaggcttaattctagaaatgtgaaaggtgtggccaccagacactcgtccttgtggtggttgatactgcctagaaaccaagatgtctaccctcgggttaaaactgtaagaaaaggaaaaagtccccctcacagccctgcaggcacccacatggagggactccagggcatcgaggtcccgagcgctgcggtgggtgtgcaggactctgctagcctgatggaagcatccccacccagcagttggcactgctgactcatggtggcacatctggagtgccacacccagtgtagctgtagctttgacagccatggtcctgccacatgagaaaaaacaaaacagaaatgggatggcatgtttcttaaatattcctgaaaaggcaaaaaaaaaggttctcccatccctcattttatagaagggggacccaaggaccaagttccaccagaatggcacagagcaggtttcacaaactgtgttccatagagggaaatggtgttttattgtggaagaagtttgggaaggacagaatcaaagcgctcttgctccagcagtacttctccccatctttaataacttgctccatgtcgggtggaatttgaagcactttacctgagtcactcattcattcctctgaaacaactctgaggctcagagactgttcttatagcccggatacagatgaggaaactgcggcatagcatgtgtgtgtgaacatggtgctgtttcccagctttctgggcccaaacatcctgcgggtgcagagcacattaaaccccacagtccttggtagctgattaggaaaataccactctgcagactgagggcagtgacacaggtacaaacagaagcatgacagttttttccctgatgagattttcttgattcctggtttgtattggatgcctttaccaaacagttatttactatctgactcaattaaagcttgctaatggggtgttttttaaaatcatcagggtaagttacagatacaagttcaccagactattaaactatagagttattttgtggcaggtgacattcatattgccagctgtaatacacttggaaatgaccaaaaatcatttttcccataatggaatatagaactaactacagaaaaattagagtgaatttttttctgatttggaattgctgttcctagtaaatggaatagcagtgctcttgctgtgcaatggtagtgctgtgctgcatttataattgttattaaagttctggggtacacgtgccatggtggtttgctgcacccatcaacctgtcatctacattaggtatttctcctaatgccatccctcccctagccccccaccctccaacaggccccagtgtgtgatgttcccctccctgtgtccatgtgttctcattgttcaactcccacttatgagtgagaacatgcagtgtttggttttctgttcttgtgttagtttgctgagaatgatggtttccagcttcatccatgtccctgcaaaggacatgaactcatcctttttatggctgcatagtattccatggtgtgtatgtgccacattttctttatccattctatcactgatggggatttgggttggttccaagtctttgctattttgaacagtgccgcaataaacatacctctgcatgtgtctttataatagaatgatttataatcctttgggtatatacccagtaataggattgctgggtcaaatgatatttctagttctagatccttgaggaatcaccacactgtcttccacaatgcttgaactaatttgcactcccacaaacagtataaaagtgttcttatttctccatatcctttccagcatctgttgtttcctaactaactttttagtgatcaccattctaactggcatgaggtggtatctcattgtggttttgatttgcatttctctaatgaccagtgatgatgagcttttttccaaatgtttgttggctgcataaatgtcttcttttgagaagagtctcttcatatcctttgcccactttttgatggggttgtttttttcttgtaaatttaagttctttgtagattctggatattagccctgtgtcagatggatagattgcaaaaattttctcccattctgtaggttgcctgttcactctgatgatagtttcttttgctgtgcagaagctctttagtttattagatgccatttgtccattttggctgttgttgccattgcttttggtgttttagtcatgaagtctttgcccatgcctacgtcctgaatggtattggctggctaggttttcttctaggggttgttatggttttaggtcttatgtttaagtctttaatccatcttgagttgatttttgtataaggtataaggaaggggtccagtttcagttttctgcatatggctagccagttttcgccgtaccgtttattaaatagaggatcctttccccattgttttttcaggtttgtcaaagatcagatggttgtagatgtgtggcattatttctgaggcctctgttctgttctgttccattggtctatatatctgttttactttatccttgtagtataaagtcaggtagcatgatgcctccagctttgttttttgcttaggattatcttggctatgcgggctcttttttggttccatatgaaatttgaagtagtttttttctaattctgtgaagaaagtcaatgatagctggtggggatagcattgaatctataaattactttgggcagtacggccattttcatgatatttgttcttcctattcatgagcatggaatgcttttccacttgtgtcatctcttatttccttgagacttgaagatgtccttcacatcccttgtatgttgtattcctagttattttattctgtttgtagcaattgtgaatgggagttcactaatgatttggctgtttgtctattattggtgtataggaatgcttgtaacttttgcacactgattttgtatcctgagactttgctgaagttgcttatcggcttaagattttgggctgagatgatggggttttctaaatataatcatgtcatctgcaaacagagacaatttgacttcctgtcttcctatttgaataccctttctttctttctcttgcctgattgccctggccagaagttctaatactatgttgaatagaagtgagagagggcatccttgtattgtgccggttttcgaagggaatgcttccagttgttgtccattcagtatgatattggctgtgggtttggcagaaatagctattttgagatatgttccatcaatacctagtttatttttttgtctgttttttgagacagtctcgctctgtcactcaggctggattgcagtggtgcaatcttggctcactgcaacctccacttctcaggttctatcaattctcctgcctctgcctcctgagtagctgggattgcaggtgtatgccaccatgcctggctaatttatttatttatttttttaagtggagacagggtttcaccattttagccaggctgatctcaaactcctgacctcaagtgatccgcccacctcagcctctcaaagtgctgggataacaggcgtgagccaccgcgcccagctattgggagtttttagcatgaagccatgttaaattttatcaaaggccttttctgcatctattgagataaccatgtggtttttgtcattggttctgtttatgtaatggattacatttattgatttgtgtatgttgagccagctttgcatcccagggatgaagccgacttgatcgtggtagataagctttttaatgtgctgctggattcagtttgcccgtattttattgaggatttttgcatcaatggtcatcagggaaattggcctgaaattttcattttttgttgtgtctctgcaaggtttgggtatcaggacgatgctggcctcataaaatgagttagggaggagtctctctttttctattgtttggaatagtttcagaaggaatggtaccagctcctctttgtacctctggtaaaatctggctgtgaatccgtccagtcctggactttttttggttggtaggctattaattactgcccaatttcagaacttgttattggtctgttcaggcattcgacttcttcctggtttagacttgagagggtgtgtgtccagaaatttatccatttcttctagattttctagtttatttgcatagaggtgcttatagtattctctgatggtaatttgtatttctgtgggatcagtggtgacatctactttatcattttttattgtgtttgattcttctctcttttcttcattagtctggcagtctatctattttgttgatcttttcaaaaaaaaccagcccctggattcattgatttttttgaaggatttttcatgtccctatctccttcagttctgctctgatcttatttcttgccttctgctagcttttgaatttgtttgctcttgcttctctagttcttttaattgtgatgttagggtatcaactttagatccttcctgctgtctcctgtgggcatttagtgctataaatttccgtctgaacactgctttagctgtgtcccacagattctggtacattgtgtctttgctctcattggtttcaaagaacttatttatttctaccttaatttcattatttacccaagaatcattcaggagcaggtttttcggtttccatgtggttgtgtgttttgagtgagtttcttaatcctgagttctaattcgatggcactgtggtctgacagactgttgtttcctttcttttgcatttgctaaggagtgttttacttccaattacgtggtcaattttagaaaaagtgcgatgaggtgctgagaagaatgtatgttctgttgatttggggtggagagttctgtagatgtctattaggtctgcttggtccagagctgagttcaagtcctgaatatctttgttaattttctgtctcattgatctaatattgacagtggggtgttaaagtctcccaatattattgtgtgggagtctaagtctctgtgtatgtctctaagtacttgctttatgaatctgggtggtcctgtattgggtgcatatatatttaggatagttagcacttctttttgcattgatccctttaccattatgtaatgccctcctttgatctttgttggtttaaagtctgttttatcagacactaggattggaacccctgctatttttgctttccatttgcttggtaaatcttcctccatccctttattttgagactatatgtgtctttgcacgtgaaatgggtcttctgaatacagcacaccgatggattttgactcttgattgaatttgccagactgtgtcttttaactgggggatttagcctgtttacatttaaggccactgttatgtgtgaatttaatcctgtcattatgatgctagctggttgttttgcccattagttgatgcagtttcttcatagcatcgatggtctttacaatttggtatgtttttgcagtggctggtactagttgttcctttccatgtctagcgcttccttcaggagctcttgtaacgcaggcctggtggtgatagaatctctcagcatttgcttgtctgtaaagaattttatttctccttcacttatgaagcttagtttagctagatatgaaattctgggttgaaaattcttttaagaatgttgaatattggcccccactctcttctggcttgtagggtttctgcagagagatctgctgttattctgatgggcttcccactttgtgggtaacccgacctttctctctggcttccccttaacatttttccttcatttcaaccttggcgaatctgactattctgtgtcttggagttgctcttcttgtggagtatctttgtggtgttctctgtatttcctgaatttgttggcctgtcttgctaggttggggaagttctcctggataatatcctgaagagtgttttccaacttggttctattctccccttcactttcagttacaccaattaaacgtagatttggtcttttcatagtcctgtatttcttggaggctttgttcgtttctttttcactcttttttctctcatcttcttttcttgctttattcctttgagttgatcttaaatctctgatattctttcttccgcttgatcagttcagctattgataattgtgtatgcttcacgaagttcttgtgctgtgtttttcagctccatcaggtcatttatattcttctctaaactggttattctagttaacaattcgtcttttttcaaggttcttagcttccttgcattgctcctttagctcagaggagtttgttattatccaccttctgaagcctacttctgtcaattcgtgaaactcattctccatcctgttttgttcccttgctgacgaggagttgtgatcctttgtaggagaagaggcgttctggtttttcgaattttcaggcttttttgcactggtttctccccatcttcatggatttatctacctttggtctttgatgttggtggccttcagatgaggtttctttgtggacatcctttttgttgatgttgatgcccttcctttgttagttttccttctaccagtcaggcccctctgctgcaggtctgctggagtttgctggaggtccactccagaccctgtttgcttgggtatcaccagtggaggctgcagaacagcaaagatcgctgcctggaggctttgtcccaatggggcacccgccagatgccaggtgaagctctcctgtatgaggtgtctctttgtcaggaggcacagggatcagggacccacttcaggaggcagtccgtcccttagcagaactctagtgctgtgttgggagaaccactgctctcttcagagccggcaggcaggaacatttaagtctgctgaagctgtgcccacagccaccccttcccccagttgctctgtcccagggagatggggttttatctataagcccctgactggggctgctgcctttctttcagagatgctttgcccagagaggaggaatctagtgaggcagtctggctacagtggttttggggagctgcagtgtgctctacccacttggaacttcccggtggctctgtttacactgggagggcaaaaccgcctactcaagcctcagtaatggcggatgctcctccccccttcccccaccaagctcgagcatcccgggtcgacttcagactgctgtgctggcagcaagaatttcaagccagtggatcttagcttgctaggctccgtggtggtgggatccgctgagctaaacagcttggctccttggcttcggccccctttctagggaagtgaacggttctgtctcgctggtgttccagatgccactggggtatgaaaaaaaaaaaaaaaaactgcagctagctcagtgtctgccctaaccagtgcccagttttgtgcttgaaacccagggccctggtggcataggcacccaagggaatctcctggtctatgggttgtgaagaccctgggaaaagtgtagtatctgggccagaatgcactgttacagcacagtccccctcatggcttcccttggctaggggagggagttccccaaccccttgcacttcccgggtgaggcgacgccccaccctgcttcagctcaccctctgtgggctacacccaccgtctaaccagtccaaatgagataagccgggtacctcagttggaaatgcagcaatcacccaccttgtgcattgatctcactgggaactgcagaccagagctgttcctatttggccgtattgccagcctccaatttttttttaataaagtaggagtaggtcaggtctggaggggctgagaaaagttcttggttcacagagtagggaaaatgagctagggggacaccccagaacttgtccttgatgtatttcactgtctcaaaatcagcctgaaataggaagtagctgaagagtctcaggtctgcccctacagggcaggcacccacaaagaaggaaagagggcctggggctgcaggtggaagtgccagctggccccttggcggcagctccattggcgggcccagttaggggaacaccacagctgcctgtgcagtgctctgtcctgctcctcaccctcctgggcatctgtggtgcttagaccctgggccagcacttgccccttcccaccagcccaccttacaccctgggaaggcccctcaccaatacaaagatacacgtgtaggcacacatttagaaattagaatttgatgagtgcagttcagtgacccagtcactgttaactctgtcactgtccctgtttcagctcatacattcagtgctcaaaattcagctctcagctgaatttgtttgttttccatgaaaggcagatgacatgggtgatgtgagcacccttcttcctctcccaggacagatgactctgctcaattaatgaagacatggtctcctgggaggctttctaaatgttgtcatttgagttcccaccaaagtcagaaggcagagggatccagggtcggaaaggaggcccccgtgtcatgccccctgtgtctgtgttacagctggtgagcgacctgctggaattctgcttctacaccttccgagagtcccatgcgctgaaggtagagttccccgcaatgctggtggagatcatcagcgaccagctgcccaaggtggagtcggggaacgccaagccgctctacttccaccggaagtgactgcccgctgcccagaagaactttgccttaagtttccctgtgttgttccacacccagaaggacccaagaaaacctgtttttaacatgtgatggttgattcacacttgttcaacagtttctcaagtttaaagtcatgtcagaggtttggagccgggaaagctgtttttccgtggatttggcgagaccagagcagtctgaaggattccccacctccaatcccccagcgcttagaaacatgttcctgttcctcgggatgaaaagccatatctagtcaataactctgattttgatattttcacagatggaagaagttttaactatgccgtgtagtttctggtatcgttcgcttgttttaaaagggttcaaggactaacgaacgttttaaagcttacccttggtttgcacataaaacgtatagtcaatatggggcattaatattcttttgttattaaaaaaacacaaaaaaataataaaaaaatatatacagattcctgttgtgtaataacagaactcgtggcgtggggcagcagctgcctctgagccctcgctcgtccacggtcttctgcatcactggtatacacactcgttagcgtccatttcttatttaattagaatggataagatgatgttaaatgccttggtttgatttctagtatctattgtgttggctttacaaataattttttgcagtcttttgctgtgctgtacattactgtatgtataaattatgaaggacctgaaataaggtataaggatcttttgtaaatgagacacatacaaaaaaaatctttaatggttaataggatgaatgggaaagtatttttgaaagaattctattttgctggagactatttaagtactatctttgtctaaacaaggtaatttttttttgtaaagtgcaatgtcctgcatgcataatgaaccgtttacagtgtatttaagaaagggaaagctgtgccttttttagcttcatatctaatttaccattattttacagtctctgttgtaaataaccacactgaaacctcttcggttgtcttgaaacctttctactttttctgtactttttgttttgttcttggtctcccgcttggggcatttgtgggactccagcacgttttctggcttctgcttcatcctgctccatcggggaatgacacactgcggtgtctgcagctcctggaaggtgtcatttgacaacacatgtgggagaggaggtccttggagtgctgcagctttgggaaagctgcctcgtttcccttttcctctagaagcagaaccagctctacgagagtgagactgggaacttgatggctcagagagcatcttttcctcccattttagaaaatcagattttctcctgtgggaaaaaaaaattccatgcactctctctctgttaaagatcagctattcccttctgatcttggaaagaggttctgcactcctggaaccggtcacaggaacgcacagatcatggcaggatgcgctgggacggcccatcttggcaaggttcagtctgaatggcatggagaccgggagatagaggggttttagatttttaaaaggtaggttttaaaaataagttttatacataaacagttttggagaaaaattacagatcatataagcaagacagtggcactaaaatgtttaattcattaatctgtttgtttggcactgatgcaatgtatggcttttctcttgccccaaatcacaaacatatgtatctttggggaaactaacaatatgattgcactaaataaactactttgaatagaggccaaattaatcttttaaaaatgatgataatcatcaggtttactcagtgaaatcatattaattattttccaaaatctaaaagctgtagctggagaagcccatggccacgaggaagcagcaattaattagatcaacacttttctccagggttcaccatgcaggcaacattaccttgtctttcaaaagacacctgccttatgcaaggggaaacctgtgaaagctgcactcagagggaggagtttttcttacataatttgcaatttcaggaatttaatttataggcagatctttaaatacagtcaacttacggtgcacagtaatatgaaagccacactttgaaggtaataaatacacagcatgcagactgggagttgctagcaaacaaatggcttacttacaaaagcagcttttagttcagacttagtttttataaaatgggaattctgacttacttaaccaggtttgggatggagatggtctgcatcagctttttgtattaacaaagttactggctctttgtgtgtctccaggtaactttgcttgattaaacagcaaagccatattctaaattcactgttgaatgcctgtcccagtccaaattgtctgtctgctcttatttttgtaccatattgctcttaaaaatcttggtttggtacagttcataattcaccaaaagttcatataatttaaagaaacactaaattagtttaaaatgaagcaatttatatctttatgcaaaaacatatgtctgtctttgcaaaggactgtaagcagattacaataaatcctttactttaatcacc

SEQ ID NO: 783 - DNA, 17643 bp, Homo sapiens
gttcttttcctggctagtcaaagcacaccttacgtacattctgaagccgtctcttatatgattcatttttttcactgtagataagacttttatggatggattgtttttctcaaataatattatcgctttgtgactaaagtaaagattattaattcctgaggcaagaagatataaaagctccagaaacgttgactgggaccactggagacactgaagaaggcaggggcccttagagtcttggttgccaaacaggtaatcctcctcgcggttgatgatgggggactttctttaaacatctgttttcctctgtcagctattagccaggccagaaatgacaaattgtatttctagtgaggcttgtcaggctttctgttgctgtgttgtttgatttaaattatttaccttcttttcttccttcactgcaaagagcattggctttggtgtcaagctgttgggttaaatcttggctctgcagtctggtagctgggaaactttagaaaagttactcaatcataagtgtcagtgtcttcatttgtaacatgcattcatgagatctacagtgcaggttttttgtttttgtttctgtttttgtttttgtttttgtttttttatggagtcttgctctgtctcccaggctggagagcaatggtgcaatcttggctcactgcaacttctgcctcccaggttcaagtgattctcctgcctcagcctcctgagtagctgtgattacaggcacttgccaccacgcccagctaatttttgtattttttaatagagacagggttgtgccatgttggccaggctggtcttgaactcctgacctcaggtgatccacctgcctcagcctctcaaagtgctgggatttcagccatgagccaccacacccggcccagtgcagcttacttatgaacatgacatgcagacattcaatgaatatcagttcactaaaaattattcacagattagtaaaaaagatgctgcctctcccttcccccagatggtcaccttgacagagaaattctgtttgcgttttaaaggggtttgaggacattgaaaatacactattacttttggaaggaaagtttagcaaagtgcaaggttcacgcaatgatttaaaaagaagtaaggggtggggaaggtcacatccacactctccaagctttgtctcattctcagttaatgttgccttaaagtgttcagatggaccccagaattgattttccagaaaagtcatcatttacattattctctttaagcaatccattatttgagagttagattgtatattcagattttttaatcataaagtatgattaaatgtgaattcaatgaattaactcattttaagaattatttgggagggaaatccagaactcagtttcatacttatgttaaaacaaagcccagacagatgaaaatagaacagtgataaatattttaaccttatgtgacagtaatggccagtcttttgatataaatttaaaaattatttttaaaaacataaaaaataacaatatttttgaaaatttcagaatggcaaaaattataataagtaagagaaaaatacaaactgagaaatactattagtaacacgtgaaaggcaataaacatacaaaaaagatctcacaaataaacatacaaaaaagatctcacaaacaatgaaatagaaaaatgtgcaaaactgtaaaatgaaaattcaccaaatactaaaagcaaatcattatataaaaagatgttcaacttcattagtaattataaaatattttaaaacactaaggttcttctttaatataccaaaattagccaaaaacttgacaaaattaagcattctctgggagcttagggaaccaatccttttagtgccctattaatgaggtaaatatcacagcccatacattttaacaaagggtattaaaatgacaatgtgcatgttgtgtgatgccacaaccctatatatgagaatttatactaaagaaaaaataaaaaatgcatgaaagttatgtgagtgcaagacaatgtattacaattaatctgtttctgagaaacaaaaccaggctataggactatatgatcttatttttataaaattgtacacagagagaggtgcatagaaagatatctgtaggctactcaccaaattatctcctggagatgggatttacttcttattttctagttttgcattgattttctaatagctcatgtgttgtttgctaatggggaaaagataaagccatgttctttatttttaaaaatgatgtcaactaagtgtaaaggaaagagtgctgatggagtcagatctgcttatagctggtgtccatgaacaaatgacttcatacttactgacctcaggttttctcatctgtaaaatgtgggtattggacactgtgctcacgtttaattttaacatttaaaaattcaatgtcggagccattctattggattttcttgacaacagaatgcccatatccgtcttacctgtgaggaagcttgccttgggcgccctctgctggccctcctgaagctaacaggggcgagtgctcggtggtttacaaattgcctccatgcagactatgaaactgttcagcctgctatagttagatctctggcactggcccaggaggtcttgcaggtaagaacaaaatctcttaaaattttctaacctgtacatctaacttgagattcccttcattataaagtctggatttagccaggaaaatattgtattattttcctccatatgtattagttggcatctagattcctgggtccttctcacctgtgcaaatgtgttcagatttgcagatcaaggagaacccaggagtttcaaagaagcgctagtaaggtctctgagatccttgcactagctacatcctcagggtaggaggaagatggcttccagaagcatgcggctgctcctattgctgagctgcctggccaaaacaggagtcctgggtggtgagtatccatcacgtagctggaactgagccacagccagtgttcacacagcccatgtgagacagtcatccatttgcccacaaaaacatttaggaactgcaggaaataggtttttaaacatggagatgaaaaacaaagataggtactaaaaaattcaagggctctagaatccaacaaaactcaattccatatgattataacccatacttaaatcatcagttaagggtaagttataatattaatttggcaagtttattgtgaagggcagagataatgtgtttgaaacacctgttgcctagcagattgtcaataagtcatagccataattagaattccccaatgcttatgcactggtttatcattttgagcattattagggattccagtttgcaaggtacctacaatctagttagagagatggcgcttatacatttatagatcacacatcaagtgcaaagtaacatggcaacaaagtgggtagcaatattgtagaatccaccaatagagaaagcaggggaggaacagtgtacgagtgagctaagaagaaatgtcacagaataccagaaatggaaggaaatgaaatgtgatctcatctggtgtaatgtctttgttctatttacaaggaaaatgaattccagaaaagggtagagatttgcccaatgtcacacagtaagattaagtgatgcttgggcttctagtgcctttcacagtcccatgtggctttgctgggtgttggacatgtaagagtgagtgaagaatccatacttgagcattgcctctgttgagaagagggcttccagaggggaccagtgctatctgttacttagtactgctactgctggggaatgcccttggccaagggtaggacggtttggaaggacatactaagagaagcaaggttctttgggcatcattttggcccctatggctgcagtctgcggtcctggtcatagttatccctaatatgtctttcatggctctttgtcttcaaccctacaccagttcactgaactatcgcaggctgctcaggacctgtggaactcagccatgcaaaggaaaccatgcaagagagtgcaaggctctggggggctgctcttgagcccctcctgcagagctgccttctgtggccatttctatgtggccaggtggttccctgccactcttgttctgtgctgacttcagacctacttagtgaaacttgaaatttgcccaagctatatcctggggaatgtgatacaaccatcttcctatccctgggatctcactaaactctctggcttctctcctgaggaggagatgcagacacaagattcactacaggtccttcaatttctctcttccagatagatcttccttccagctgcagaaggacattctacttattcttactatcttgggggaacctcccttatgacatatcctaaatgttctttgcactgctgtacttaagagaaatagaggggacttagaaattaattttctctctcaatgagaccttgtagtgaatattaaactcttattgcttccacagtgagttctttgtcctgatacctgcccttcacctgaagcaattcatggcattgattcagtgagtggagagacatagagcaacatcatttatggacactaaaaaacttcatctggcttatcttttcaaaactattacataataatgatgatgggttttaatagcttcaggttttaactagctactatttgtcgaacaattcctatacactaggctctgtgctaatcactgtacgtgaattatcttaattaatcttcccaacaactgtgtgaagaaggcatatattgttgatcccactgtacagacaagaaaagtaaagctgaaagagattaaatcatgttcctaaggtcatacatgtaataagtgagggagtagaacgagtattggagtagtccaggcaagatgctagaagctgaaacctcttgatactgcatgtgtagagatgacgagctctagcaccatgtgaggtggggtcaaggttctaaggccaccatggaaacattggcttctctcccagtttccaccacactccccatctgggtaacctcagcaggttactcgcccctgtgaggaggttctcttctctgtacaatggaaatggttatccacacctatctctcagggaggctctggtaattaaacaaaataatctcaacgaatgtgcttgacccatgtaggatttaaagcaataacttgagcatcattactaagatgactaagacttggagtcagactgtctgtctggggtcaaatcttacctttatcatttatttgctgtaggatcctgggacacgatgtcttctttctgcctttgtttcttcatctggaacgtaggaataatgacagggttattatgaagatgattagaatatatgtaaacggcctggacctgcatcgggtacatagtaaatgctcaataaatgtgtggagtaaagccgggtgcggtggctcaggcctgtaatcccagaactttgagacaccaaggcgggtagatcacttgagcccagaagttccagatcagcctgggcaatgtggcgaaactctgtctgtctctactaaaaaaaaagtacaaaaaactagcctggtacagtggtgctcgcctgtagtcccagctactcaggaggctgaggtgggaggatcacctgagcccgggaagtcgaggctgcagtgagccgagatggcgccgctgccctccagcctgggcgatgggagtggggtagtgcaaggcagagccatagcgcagcagagcggccgttggttgcatatctaggagctaaaatgtctccaccaaggagctcacggccacagccgcaacttgcagagtgtggggcagaggggaggggagagagatgaagtgaggaaggaggagggggagaaaaagaatgagagtcagggaacagacagtcataggcaaggaggaacacacataggcacagagagaaaagagagagtacaaagacagggagagaacggagagatacatagaaagtcaaagacagagatgcacaaacagagagatggtaagacagagagcagcactcagagaaacacaaagagagacagagaaaggggagaaagagaagagagagagtcatgattgtctgggctccggcgtggtcttccaagtcctctgcgtgtgtccctcggccctctgctttcatggcttggatccaggggaaacaaagaccgtggtggtagagggtctgtcctaacatgtttgctcacggaaggccaaggacagttgcttcagagtgcacaagaccaaaccaggagcaccaggtgtgatgccaggggtctttgtcctcgggccaaaggtcagaaatttgggttcctctttgccacctctttcagaacagtctcactggtattacattggaaggcatgttttcgcagctgtccctttctgaaatttaagcccatgtcattatctgccctctggtaatcaatggccagccttctcttaagaagatcaatttttacgtaaagtgcaaggatttcttttcctcctgagaaaataatcaaggcagcccaattaattatttctgttgctaagttttgaatttctcgtttttataaaggttgggagggttggtggcagtaacatagatttttaaatcatagagaactggatctgcaaagcagcttttccatcttactgtgtgaccgtgggcagatgaccatcctgagcctgtttcctcacctcctcaagcaattatgataaaaatgccatatggataaaacacctaacatggtgcctggcatcaagaaagcaccttgcagggtgaggggcagaaaggggaggggagagagatagaaaagtgaggaaggaggagggggagaaaaaagaatgagagcagaaaacagtcacagacaaggagggacacacagaaacacagagacaaaagagaccgagatgtagacagagtgcaaagacaggtagagaacagagagatgatagaaagtcaagcaccttatttacaaaagctagtgacagtggtactagtagtaacggcaatggcataaaggctgtgttttatttatcataaaattatgttcatgtttatgaatgtagtagaagatgaagcatttaaatacatgaatatctttgctgtttgtttgtagtatatttgacatactcactgaaacatttcctgccttgccgtagttaggttggtcattattcattattcataggtacaaggaatagcacatacaaaggatctaaagctacactgagcattcgtgttccaagacggagctgggactatggcatagaaggatgtggctggataggggcatacaaccaggttataaaatctcttacatgctagacgagcagagagctcatctgaaagcaatggggagccctgggagatgcataggcaggggctgaaataaaacagaagagtggggcaaacaagcgacagtagtatcatttgaatgaggagagagaaaatgctgttatgacagctgcagtctgtggacctcccttatggaaggaaacacttttcacccaccatggtgtcagaaggtagccacatagtcacaaagcctacacttgctagcttgacatccccttgatcacctgatgcctctgtacatccagccatctccccctctttataaaccttcagattcagtgacatggcacattcaccaatggactagcaggaaaagcatgtgcctccctgaatcatggattcctttgcttctaggccctggctctttcctatttctgccatggttgcctgacagacaccctgtacttaaggcagacttaagtgcttgctgtttctatccttccccacacattcctgcctcctttgcctaaaatgttccctcccccagtactgacacatagcccacctatgctcaagttccagtcaagttgccatgtaacccttcccttgtctcccaagccaaagtgactcctccctccttggaatgctccaaactaccaatttgtgtccctcatccactcttgtgatgccttaaattatagttatttgaccttcactgctaatacaagattctgccagctgctgagaatctattccaattatgagtgtctatctagtccaattatgtatgtatgtatattccaattatgcattccagaactggggagataaccacagcatgggttcaggggacccactggactcactggacccactgtgaggcagatcaagctaaaactccattgatcacctgacttccataacccctactctgactggtggaccgcagtgacgttttcttggaattaatgtctgttcagaggcagtgtccagtaatcgcagaaacacagtcacactggtaaaaggccataggtccctttgggaaaagccagaagaagggtaagctgtatacatttttggcagtgtagcaggacccttcatgaagggactctcttcattcaaggggttcctgattgcaaactgtatcaagtctgggaattgattgtttttgctatcataatgtgcaattgccttttgtttatgtgcagatatcatcatgagacccagctgtgctcctggatggttttaccacaagtccaattgctatggttacttcaggaagctgaggaactggtctgatgccgaggtaagaaacttgctgcctgcttggcctggcctttctagagcaaaggaccagccagagccccagatctcatttgattcaggatcaagtgtccttcctgggcactatgaagagaagcccctttggctggtgaaatggagagaagagggttgtgtgttcaactcattcaattctgtaagcattgctgaagcaggtgctgtatgccagaccctagatgggctacaagcacatacggatacataggaaagagcccctaccctcagcaagctcactgtcagtaaaggagacagaaatacatcaatcaaaggaggaagagaagatgaggaattcacagaaaggataatggagtttctgtacaagatttaccagaaagagagtggtgtgtagacatgcctggagcagacaccttggagccgctgacagaaggtgaagcagtccaagaaaatgtggaaacttttccgctgctctacacagtccacaaacctgtccattttatttcgttgaagctttgtctgagagataaccaaatagacagtcaaagtaagttatctcagccacatatggggagtggatgctgctgaattgtgattaattgggggagccatataggtacatttggcatgatctgggcctatgcggtcttacaatccctgtataaaactagacaatgaaaaacagaaaacaaaacaaacaaacaaaaaaacaagaacgaagcacctaccacatgccagctactgaggctatgaaggtattctcccgccttagaaagcccaggattaatgcaggattgcgacatttaaacagaacatttccatacagcatgagtataaatgactttcccaagtttacactgagagtaactgacacagcaaccccagcaaagtctgagctgagtcctgaataattgtataaaaaggggagagaaacagagtgaagaaagggtttcccagactctgtcccaggaaagaaaatgagctcgtggagaggaatagactttctctatgaaaacagagggaacaaagaggaagatgtctgggaaccgaggagtaatagagacctgagtttacatcactactctgccactccctaggtacctccctttacctgtttccctactggaaagtgggataatactttttacctcatggacttgtcaggaggattcattaaaacgactcgcataaagcctatgccacatggtagatgccaattcagggtctcaagaaagaacagcccacaggattgacactgaaccttaacaaagttaacaggaccaaggtgcagagagggtgctaggacagcgaagccaaagaggacccctcaaacccaacaagagctgtgcggctccctgattcctcgccagtgttgctaccgcccttggctcttcttgcatggctggctcttgagacccctggaagctgatggaggcaacgtgagaagcacatggacatccgaccttgagcttgagaggcagaggcctgagttctagttacagccccagcagtaccagttgtgtggactgggagggaggctatcacgtacatacttcaagcctccaaacctgtttccccttctgacacaggatcttctgtggctggtatagagtgggcactcaataaatgctgtctggtcgtctggctggcatgcctcatgggcctgagaattgaatagaattacagtgatagaagcatgctggtattgtaagtggtttgtaagtgtgaggactaaattattattaaatagtaatcacatctaatcttggataaattagtaaaagcaagaatgggagcagtaaaaacctaagcaacccgaactaaaattttattgaattaattcaatttcttgtcatgtaacacaaccccagaagagaataaaataaagtttatatacatacacccatatatataaacatttgccgtgtttaattgaacaataggtttctggttacagaataagaatttatcatgtcatgtgtttcatacaatccttaaaacagtgagtgattaccatttatttgcccacaagaaaaattcagattgcatggccttggatatgaaagaagacagcacttttgcaaaggaagaaggaaaaattggggatcgatatgcagacatacagaagtaaaacagatttgggattagagctgaaagttttaaaagttgcaacaaagcagatagttacatatctgcctctagtgcccaggaaacccccaaaatccaaccagatttggaggcatggttactgttgaggaaagacaaaggggtgggcatattcacctccaatcagcaggaattctacaccagcacggggagcagtctcctctcctctggaggatcacctcacatgtttaggcaattgatccatgcccattcactagcaagtcaaaataagttacagaccactgtttacaatttacagtgtgttattcttatgtaatatagggtaataataattaaaataaacacaatataggcttaggaattagggagagctgggctctcttcctgtgtccagttgcccattcctgatcctctctctccccatccataaactaaaggtgggccccacctacttaggctgctgttaggaccgaatgtgaggtgcccagtgtgttggaggtgtcccgcaaagagcactgccataatgcctgttctctgatgcacattgtgttcacatactgacacctctaaaatcaggagtgtgctacaaacacactgtgtcactgtgtatcatagattcattgacagtgattttattttctttcttcgtgggacacaaaataatggcacattttacaatcagcagtttcttagatctgttgaaatgcagtactataatacaataggcctcatgacaggtcctaggtagcagtaattattttacagatgaagaaactgagcctcagagaggtgaagtgacttgtcaaggtcacataaaccactgagaggcaagaccaggaccccgggcacgtcctcagaccctaaatctcttgccctggccttgtactgcctctttctctgagaccgaacgctgcagcagttgtgttttttcccagggtggcaggaagccttctgtggggcttagagcacgatgtgtggaggaagtgggggctgcgtgagtccctccttcttggcacgctagcgttctgaggggagggctgtgctttaaacatgcaggcataattaacaggacctctccttgtacatagctcgagtgtcagtcttacggaaacggagcccacctggcatctatcctgagtttaaaggaagccagcaccatagcagagtacataagtggctatcagagaagccagccgatatggattggcctgcacgacccacagaaggtaacctcagacttggccacaaaggccctcttgggaaagccaggctggcatcctctttttggggaatggcctcccggcctataacaaggacacagcgggtggatcttctccagatgtgcctccagctgacggagaccaaagtctcaaggtcaggggcccagttctggccctcggtggaggatatgatttaaatgactccattgtatagacctttgtctaattaaggccctcctgaatggcagaacacaaaattaccagctttctagagccttaaaaagtgtgtgtgtgtgtgtgtgtgtgtgtgtgtgtgtgtgtacgcacacaggcctattatgagacagattaatcaaatctccattggatcttgagttaaagttgaaaactttcagctagcctttttttttagatgctgtaattttttttatgttatccttgatgtttttcactgtaacttcctgttcttttcatcaataccttcttgtaagaaatgacgtgagtggtttttgtaaggaacagctggttgatgaggtctaggtgtggggtcttcagttcacagattcttggtggggcttctttagttgactcagacaaacacagggaacataaagcgggaagccccatacttcctgcttcttaataaaactgctgaagataccacacattcgttcaacctctttcacgaatatgtatgtgtccatcctttagtacttgtctataaacatcttatggctttttctctttttaaatattatgttacagaaaaacagataatcctttaccatagttgttacaaatattttatacaattatttcgtttttaatgtcatttatttgactatcagaaattttacatttttatgtattcacattgctatcaatcagaaccctgtcattcagatggagtaaatatttacatctatttctattttttgcagtaatattggtaatgttttcctattagcggttgagtggaatgactttctctttttccttctttaagcatttctgtactttcccaatgtttgcaatgaaaaccatgttttaaaggggactgaggggacttccttggctgtggcaggtgggttgctgagctgtacacttctccatctcctgttgttgcagaggcagcagtggcagtggattgatggggccatgtatctgtacagatcctggtctggcaagtccatgggtgggaacaagcactgtgctgagatgagctccaataacagtaagttataatgcaccacccctcaccacttcccaatgcgcagactcttccctttacctagtaagcacaaaaataggcacaggggaccactgccctcctcattccacaccaacaactcttttctccagcaaggcagtggccttgccacagacattggttaccaacattcagtcctttgtgatcactttacagtctttgtcacatcaatgtaccagctgttctgttatttactcaatattttctttaaatccattcattttttttctgaaatacacttattttaaaatcacattctataccatgagagggatatatatcccattttgggaagcccagaccacagggagtaaatatatgtggtgaaaacagataaatctcttctgacttctttaaaatgagggtttgccatgagccctggaaggccggtctttgcctgagttcttcccttctgtctgtttccctgaatcctgtccccagaatgtggtggcctgaagctcagcgcaggctgcacacactcgcgtgagccttctcctttctctggcctgctttcattctttgtctttatgctcatgagttagacttttcagcattcatactggtgacatcttgggctggatacttcttggttgtgggggctatcctgtacattgcaggaggttgagcggcatccctggtctctaatcagtaggtgccagtagcactcctcctcccaggtcgtgacaatcaaaaatatctccaggcatagccaagtgtttcctgtggggggcaaattcaccccctggtgagaaccatgattaataagcggtgtagaaaacttcagctgtacaagatcacagaatattaaagaatactcagtgccaaaggtcgtatacttgagaatatcccagtgggtctaataggccatcatagtgacaccaggaccccctgccagccaagaagtcggcctggagcaggcctgggctgaggtctcagctattgggctggggtagggagggacttggtcatccccagcaggacatgggggcagtttactgttgtcagaggaataaacttataagaaggaaagagagagtgagaaaactttctaacagcatgaggcaaagggcaggcatgaggagacacactctgaggaaagccctcagagataaacagccatagaggggattttcacagaccagtgagagcacagctgctgctgttcaaggcagaagttggctcaaatggaaaaaacacaaccaaaaccaataggtagaggctatcaacaagtggatttttactccaatcaaggaaaaaattttaaacagttagcactgctcaaacacataatgagctaccccaggaagtagtgagaaaccttataaccagagttaaccaagcaaaaggtggacattgtagttgttattgcagttgacgcattaagtgttagaagcgaggctccatggcacaaaagaatcaaatgaggaacattgtaaaaataccaatatcagggattcgttttcagacctgcagcatcagaatttctgggactggaggccagacctgctttgggagcagtagaccagatgcctccctaagtccctcacattccccagattctgacattcccattggacaaagtcctcaaacgaaagtcctttccctgtgagtcgatgatcacatcagcaaaattcagtagcgaagttgcctctgttgtgtggatgggaaccagaagcctgaagctctctgagaacagcacgtctttgggttcctttcctttcccatggttacttacccagctcgtggctgtcagaacacaggctctcaaggcagaaaagcacaaggaatgaagcaaggatttgagagaaactggtggaaggtagaatttaaaagcccatccccctcagccacatcagtacaatggattttgctccccactcagtttctattttttttaattcaaaatgtatattaatgccccaatatacagccacacacacattcttgttctctctttgtgacagggctgttccttttttataactctttagaaagaattccagagcattttattttgtgtgtccctctctcaccctttctgactctcccctttacatcaaaatgtgttttgtgactctggaaaattgcagcttgcaatgtttcctgatgttttgctggtccactttgagacatttaataatgataacttgggttttgcagttggaaaagaaatttcatattcagtatacgttgaggtcaagagcatgggttctgcattctgaatgcccagggtagaattccagctcctcctagctgagctgtgtgaccctgtgcagatctctgacttctctgtgcctcaaatgcctccttataaaaaggaggaaataatcgccctaatcatctgaatacatgtggcatgcttatcacgtgcaagctaggctaatggctccgtggcctggagaaaagggaaagtaaggtttctcagtcacccttccctgcactccgcctctgatgaggtgggaaaagcagacctcttgcttagtgcctatagtgagctgggctgtgcttgattgtttgaagctgctattctagcttatccacaggctcaatgggcagcaacctcaaaaggacctgctgatgagacagtcagtctcaagcctggcccatggccttgtgccgtattctctttgccccacactgtgaaagtacccacaagcttgcaggccctgtttcatttatactctgtggctcctgcgctgagcactatggatgcaggcatgggcaggccccatcctctgtggctcctgagaaccaggagtgggaggggcacacctcaccccctcctctccccagggttctcacccacccacacgcactgggaacagggccagatctgcaggtcagggcccaagcagacacctagccagggaacaactcctcgctctgctgcagacacccatggaagacaagtgatgctgtggagcttggcttctgggagggaaatagttggatctcacctcaaaaatacttcagtccttcaaaaggccacctccgccttgggctctctcctttttcataagcagatggcctgttgggatgtgaatggctttagcagctttcagttctttgaactttgaacaggagcttcttagagcctcagctgtgggcttgaggacaggccacactcagatcctcactgcatcctgcctcaacacaagagcccctcattctcagttgattcatgtcaacccctgcctttcctcaaaagcagtgctggagtggagcttttgccatggtgtgtgacatttcaagtgtttttctttcattgggaaagttggtatctgtattacggttctccagggaaacagaagtagttggatgtatatatagagagacagagatttactttgaggaattggctcatgcaattgtgggggctgtgaagtctcaaaaccgcaggacaggccagcagcctggaaattcttgcaggacttaatgttgttgtcttgagtccaaagacggtctggaggcagaatttcttcctctttgggagacaggtcttttctcttaaggccttcaattgattggaggaggcccacacacatgatggagggccatctgctttactcaaagtctactgattgttaaacgttaatcacagctaaaaaacaccttcgcagcaatcaaacaactgtacatcatagtctagctaagttgacacataaagtcaaccatcatattgccttatctatgcttccaagaaaaacacccagataactctggcaagctcagtatagtactgaatggatttaaatatctgtttattttcttacagactttttaacttggagcagcaacgaatgcaacaagcgccaacacttcctgtgcaagtaccgaccatagagcaagaatcaagattctgctaactcctgcacagccccgtcctcttcctttctgctagcctggctaaatctgctcattatttcagaggggaaacctagcaaactaagagtgataagggccctactacactggcttttttaggcttagagacagaaactttagcattggcccagtagtggcttctagctctaaatgtttgccccgccatccctttccacagtatccttcttccctcctcccctgtctctggctgtctcgagcagtctagaagagtgcatctccagcctatgaaacagctgggtctttggccataagaagtaaagatttgaagacagaaggaagaaactcaggagtaagcttctagaccccttcagcttctacacccttctgccctctctccattgcctgcaccccaccccagccactcaactcctgcttgtttttcctttggccatgggaaggtttaccagtagaatccttgctaggttgatgtgggccatacattcctttaataaaccattgtgtacataagaggttgctgtgttccagttcagtaatggtgaatgtggaaaagtgaaataagaccaagaaatacaccca

SEQ ID NO: 784 - DNA, 29545 bp, Homo sapiens
caacccacaccgcccctgccagccaccatggggctgccactagcccgcctggcggctgtgtgcctggccctgtctttggcagggggctcggagctccagacaggtgagagagcagacacaggggtctggggcctggcagagtgtcctgggggcagggcgaggcgggcgggcaagtcgcgtctgggaggaggagctggtcccagagtgcagcctgcgcggctctgctgaggctcctggcccgggttggtccctggaagcccccggccctgctgactttcaaggagctggaaggtcggggctcccctgctattcctttggggttgactgcccgacgacagtgtgggtcttggggccagcaccaggtggaaacagcaggtcaggccccagtgaactgggtcattgtccataggggaggaaggggtggccaggatcccaccagaaggccccattctcaggtggcagagacccttgaagagttggggcagcacagcccttgctggggagcggggtgcccagaatgccctctcctacatcccgcttggcacccggccgcactcctcaccaggccgggggtagaagccctgagacccctgtggtggggtgaccaaggcccagcagagggcccgaggataggaaggaacctttcccggccaggggccctgtgctgggctcgaagctgcttccaggtgcttcttcaggggccttctctcgagggtagcttgggcagccttccccctccggggccactcacccctcattccccgctgctccctcagagggcagaacccgaaaccacggccacaacgtctgcagcacctggggcaacttccactacaagaccttcgacggggacgtcttccgcttccccggcctctgcgactacaacttcgcctccgactgccgaggctcctacaaggaatttgctgtgcacctgaagcggggtccgggccaggctgaggcccccgccggggtggagtccatcctgctgaccatcaaggatgacaccatctacctcacccgccacctggctgtgcttaacggggccgtgtgagtgtggtcggtggcacccctcccacatcctagcaacgggggctgatgtttcccaaagggatattccttgtagccctagaagaccccttccgccccagcacacagctcaggagaacagccttgaggtttgggttcaggtcactaattcattcaacaaacactgatgagcccccaccattccccccataggcaaggggtttcagttatccctttgcctgtgtgtccctgacagcccctcccctcggagcccaccaggctccggacagacttggcacccctggaggctgcatgtctctggtcctgtgcatggagtggccgtgtgtgccctccccaggctagagttacagaagccggtgcagggggctgtgggacccccttccccatccccagctattgctcccctattgtctccagaacaatgaggccctgtaagtgcgttcccatccagcgcctgcccctcttctgcctggggatttagtttcctgcaaggggccccagcatgggcatgggcaggcgggtggaggccctcaggcatgggcatgggcaggcgggtgggtagaggccctcaggcgtgggtgcaggcaggtgggtagaggccctcaggcatgggcatgggcgggcgggtgggtagaggccatcaggtgtgggcgtgggtgggtgggtagaggccctcaggcatgggcgcgggcgggtgggtgggtagaggccctcaggcgtgagtgcgggcgggtgggtggatagaagccgtcaggcatgggtgcaggcgggtgggtagaggtcctcaggtgtgggcatgggcaggtgggtgggtagaggccgtcaggtgtgggcgcgggtgggtgggtagaggccctcaggcatgggtgcgggcgggtgggtgggtagaggccctcaggcgtgggcgcgggtgggtggatagaggccgtcaggcgtaggtgcgggcgggtgggtagaggtcctcaggtgtgggcgcaggtgggtgggtgggtagaggccctcaggcatggcacaggtgggtgggtagaggccctcaggcatgggcgcaggcgggtgggtgggtaggggccctcaggcatgggtgttggcaggtgggtgggtagaggctttcaggcatgggcaggcaggtagaggcccttgaggaccgaggcacagaggctggggtgagtgcctctacctggaccagcaaggggcactggcaggaggtggggtagggcccctgacagtctcaggggcagcctggggggctctggggggtttgggaccccatggggggatgttccaccaagcagggggcctggaagggggctgggcagcctggtcctccctcctctcccaacctggtgccctcagggcctctgaggggggaccctgcccaggaccgtgccccgaggagggagtggagaggaggggcgtgcaggcaggaggtggctctgccggggaagcccggccagcggagatggacaggtgctctttggccactgcctatgtccctccaccccagaggccggccaagttggtgaccccagggcaggagctgggcctggcagagccatctccaccaccccaggcgcccagcttcagtcccctctgggcggcggggtcccgggaggacaagctggggcgggggggcctgggtggtggacccaagagtgaccccgatgtgcctccgccagggtcagcaccccgcactacagccccgggctgctcattgagaagagcgatgcctacaccaaagtctactcccgcgccggcctcaccctcatgtggaaccgggaggatgcactcatggtgctcaggggtccccggactcgtggggctggtgggggctccgtcaggcctctgggcagaccccaagggagggcagggagggcagtgctctgacccctcaccgagagggcatgggtggggcagggcctcggcagcgcggggcgtcggtgctggacttggggggcagcagcagaagccgacctggccctgacccccccaggcctcagccttcccccaaacgcactcggcttctcagggacctgccctgccaggccgctccctggctgctgaccccagccttcctgccccaccttcctctggctcaaacaagccacgagtcttgggggttcctggcggctgtgggccgggcgggaggccagctcacctgctccctcccgcaacagctggagctggacactaagttccggaaccacacctgtggcctctgcggggactacaacggcctgcagagctattcagaattcctctctgacggtgaggcccggagggcttggagggggcagggtaggctacgggcccccaggagccctagctgaagggccgtgcatccccaggcgtgctcttcagtcccctggagtttgggaacatgcagaagatcaaccagcccgatgtggtgtgtgaggatcccgaggaggaggtggcccccgcatcctgctccgagcacgtgagtcccctcggtctggggtgggggtcctggcggagctggcctctgaatagcatgctcaccctgcgtctgtccccagcgcgccgagtgtgagaggctgctgaccgccgaggccttcgcggactgtcaggacctggtgccgctggagccgtatctgcgcgcctgccagcaggaccgctgccggtgcccgggcggtgacacctgcgtctgcagcaccgtggccgagttctcccgccagtgctcccacgccggcggccggcccgggaactggaggaccgccacgctctgccgtaagccccggcgccttgtgggcaggggaccccagggagaccccacgctggtgctttccccaagcccgggtgggagctgtgtctgcgccgggcaccttgagctggggggacactcaccgcaccgggcaccttgagctgggggaacactcaccgtgccgggcaccgggagctggggggacactcaccgtgccgggcaccttgagctggggggacactcaccgtgctgggcactgggagctggggggacactcactgagggcaccgggagctggggggacactcaccgtgacgggcaccgggagctggggggacactcaccacgggcaccgggagctggggggacactcaccacgggcaccgggagctggggggacactcaccgcaccgggcaccttgagctgggggaacactcaccgtgccgggcaccgggagctggggggacactcaccgtgccgggcaccttgagctggggggacactcaccgtgccgggcaccgggagctggggggacactcactgagggcaccgggagctggggggacactcactgtgacgggcaccgggagctggggggacactcaccacgggcaccgggagctggggggacactcaccacgggcaccgggagctggggggacactcaccacgggcaccgggagctggggggacactcaccacgggcaccgggagctggggggacactcactgagggcaccgggagctggggggacactcaccgcgccgggcactgggagctggggggacactcactgagggcaccgggagctggggggacactcaccgcgccgggcactgggagctggggggacactcactgagggcaccgggagctggggggacactcaccacgccgggcaccgggagctggggggacactcaccgtgggctgagagcccttctcggtgcacttcggggtggagcggctgctgtgccccagcctcaccctcactgcgtggcctctgcggttccagccaagacctgccccgggaacctggtgtacctggagagcggctcgccctgcatggacacctgctcacacctggaggtgagcagcctgtgcgaggagcaccgcatggacggctgtttctgcccagaaggtgcgtgtggaggatggccccgccccggcactgcccaccagatgagaggcagccctggcctggggttctcgcctgcgctgaggggacggctccgctgggtggtgggggcagcggcggcacagaagtgcctctccctccacccgataccgggggagaaggggcctcggtgtgaggcccttcccaaagggtggcttcagggaggccgggaagggggctgccttcctggttatcaccctggggacagacctcctcctgcccggcccctggcctggtgcctgaggcctttgggagcagctcgattgtcaggggcaggaaggtggcctggaggctggacccccatggccagaccccaacccagggaccaggtggggaccgcaggcgtcagcacaggggaccagtggtgcctgcgggtgggaggcctggctggcagcccctcggtggggattctggctctttctgagccagccggggtgacatcgcctccctggctgtcccaggcaccgtatatgacgacatcggggacagtggctgcgttcctgtgagccagtgccactgcaggctgcacggacacctgtacacaccgggccaggagatcaccaatgactgcgagcagtggtgagtcccggggccagggctgggcacagcagaggctggggcggctgagccctgaccctgtgccccgctgcccaacagtgtctgtaacgctggccgctgggtgtgcaaagacctgccctgccccggcacctgtgccctggaaggcggctcccacatcaccaccttcgatgggaagacgtacaccttccacggggactgctactatgtcctggccaaggtaggctgcccagggtctggggcatggggcagagctggggctggcatccaggcccttggctgtcccggggtgggtgggctggctgtccctgaagcagagggtgcctgtgggctgtcctggggcaggtgaccatgcttctgctctctggctggagaataagaagcaggccttcctttctaagccactgccgggtcctagggtgcagggtgctgcccgtcccggccctcagcagctgcactgcctcttgccccatcacagggtgaccacaacgattcctacgctctcctgggcgagctggccccctgtggctccacagacaagcagacctgcctgaagacggtggtgctgctggctgacaagaagaagaatgtgagtggtcctgccccctccttctggagccccaggtcccccgaggggggcccttctcagccctgagcaacctcggccttccctgcaggtggtggtcttcaagtccgatggcagtgtactgctcaacgagctgcaggtgaacctgccccacgtgaccggtgagttgtgccccagggaggggcccgggcccttcgagctccactgggcctgcagtgattcggacagtccagccacctcggacccaggaggctgggtgggaaggttccacggggggagggtccctgcggcacccagcaggctccgtcctgggtcctctgctggagggggtggtgggagggtgacaccctcccgctgctcacctgggccaggcaggtcccgggagccccgcccctcgccatgccccttactgtgtccctcatcgtgcccctgcccacagcgagcttctctgtcttccgcccgtcttcctaccacatcatggtgagcatggccattggcgtccggctgcaggtgcagctggccccagtcatgcaactctttgtgacactggaccaggcctcccaggggcaggtgcagggtaagtggccccaccggggttgccccaacaaaggcccacaggggggcctgctagccccagactcttcccaaccctgtcctggcccctcaggcctctgcgggaacttcaacggcctggaaggtgacgacttcaagacggccagcgggctggtggaggccacgggggccggctttgccaacacctggaaggcacagtcaagctgccatgacaagctggactggttggacgatccctgctccctgaacatcgagagcggtgaggctcggcaacacgggcgcccccacctagcgtgcctagggtacccggcccatggcctggaagggcagacggggctcccagcaggaagcatgggtggtgaggggcagaagtgaggtggctctcctccaggggcagcccggcccctgctgcttcctgctgtggctagtttatggcggccatggtggcagcctgccaggtgacctggaagagggcctgggctggtccctacctgccccgtcatgtccaggatgctgggcccttgggggtgagagacgggaggtggtgggtgccctgcaggggtttctatctagccaggagctgcctggaaatttgactcacggggaggaaggggcctgggcatcggtgcacagagggaaccatatctggggcctaggcagccaggcagcagggcccaggggatctcacgggggtcccgggccccgctgaagttccgatcccccactccccagccaactacgccgagcactggtgctccctcctgaagaagacagagaccccctttggcaggtgccactcggctgtggaccctgctgagtattacaaggtgggtgggacccacacccccaggcccccatgccatcgaggtggactcagggcacccccagccccccatgccacccgtgaggtggactcagagcacccggttgggcccactggttgctgtgtgtgcgtgtgagcttgcatctgtgagcgccgggccacactctgcctccctgcctcactgcccgtccaccttgctctgtcgcccagaggtgcaaatatgacacgtgtaactgtcagaacaatgaggactgcctgtgcgccgccctgtcctcctacgcgcgcgcctgcaccgccaagggcgtcatgctgtggggctggcgggagcatgtctgcagtgagtgccgtccccgtgggctgcatcctggggatggggtccgggctttgagctcctgggacggggctgggggccctgagcacgggtggtccagggagaggggtcggccccctgcagccacggaccaggctccagcttcgtcagccggtggtagcaggaaaccagcaactcctatagcaaggggcggccacgtagcaggggcagaacctggggtgggcctggagctgtggcggccgagtgtgggagtgggtcccagagtgtgcactccctggccccctggccaccctggggatgggagctgggcgtctggctcttcccgtccctcacaccaccccgtggtcctctgcagacaaggatgtgggctcctgccccaactcgcaggtcttcctgtacaacctgaccacctgccagcagacctgccgctccctctccgaggccgacagccactgtctcgagggctttgcgcctgtggacggctgcggctgccctgaccacaccttcctggacgagaagggccgctgcgtacccctggccaagtgctcctgttaccaccgcggtctctacctggaggcgggggatgtggtcgtcaggcaggaagaacgatggtgggtacctgctcgggggtcaggtgtggcgtgggggcgggggagctccttctgaacctgccccaagcggagacctgggagtctctacctggggaagctgagacacccaaggctgaggggtgcctggggtggggggcgctgagaggcatcaggctcacatctgcggggaagctgcgggctgtctgtggccgtcctgcatgggccccgctcatccctggccttttccacagtgtgtgccgggatgggcggctgcactgtaggcagatccggctgatcggccagagtaagtggcactgccccggccacccctccccagccacccctccctgcctgccctggccaccctccccggccacccctcccgggcctgcctgagacccccagcttcagctggagctgaggtggcccctccgtcccacaggctgcacggccccaaagatccacatggactgcagcaacctgactgcactggccacctcgaagccccgagccctcagctgccagacgctggccgccggctatgtgcgtgttgggggcgctgctgtgggcgggcagggattcctggctggctgagcctggctcttgtgctgtgcccccgctagggtctgggtgccgagtcctgaggacgcaggccctgttgatgctgtccctggccctgggagggaagtggcagcctgtgagccaccggggcacaggggccagtgtagggcccttggccggcagccctcaccagtctcactgccctgtggcgggcccaaggggagggaagcctgagcccaggccagggggagtggtgggaggtctgggacatgacagagactgcacggtcaggcctttcctggttgcacatccaatcctgaccccagggagggctgcagcctcacctgtccacccctgaaccccactctctggctgtccccagtaccacacagagtgtgtcagtggctgtgtgtgccccgacgggctgatggatgacggccggggtggctgcgtggtggagaaggaatgcccttgcgtccataacaacgacctgtattcttccggcgccaagatcaaggtggactgcaatacctggtaagctggcccggcctgtcctggctgcctcccaggccccacgtgctccgcaggggtggccactggagagcggtccaaggggcaagtgcctctcctgggggttccgcctgggtcttgcgagatcctgtggtggcccctgtcccacgggcagggtggtctctcatgtcaactgctggtcttgaagccatgggagaagggacatttggagccacttttggggcctgcaggtgtcctgtgtgggaggcacagggagctgtctgcacggtgcccagggtctcctccagccacccatgagcaggtcctgggtcccttcaggctcctctcctgtcctcctcagcacctgcaagagaggacgctgggtgtgcacccaggctgtgtgccatggcacctgctccatttacgggagtggccactacatcacctttgatgggaagtactacgactttgacggacactgctcctacgtggctgttcaggtgtggtcacgggcactgcctggtcgggctgcttatggtcagggaccctctgcctgccccaagtgcagtgcttagctccccgagaaaccctgagacttgggaaggccggcctttcctcagccccagacccgcacctgcacccgcaggaggattcgttcttctagccagggctgggtaggggtggtaaaacccctctgtactgcccagttctgtggttctcctctgggtcctcctctgggttctcctgtgggtcctcctctgtggttctcctctgggtcctcctctgggtcctccctcctctggatcctccctcctctggatcctccctcctctgggtcctccctcctctgggtcctccctcctctgggtcctcctccaggtcctcctctgggtcctccctcctctgggtcctcctctgggtcctcctctgagtcctcctctgggtcctccctcctctgggtcctcctctgagtcctcctctgggtcctccctcctctgggtcctccctcctctgggtcctcctctaggtcctcctctgtggtcctcatttgggtcctcctctgggtccttctctgggtgcacaaggtgggtgcaccagccatggggactgagggcacctgtttggggagctgagtaaaggccagggctaggccgctgcccgcgcggctctccagatccaaatcccacagccctttgaggcaccgtgatccccagggacaggggacaggcctgcagcagggtcaggtccttggatgggccaggccagggcctggtttgtctgctcagtggctgtgaccctgccaactggggcgggtgtgccccgggacacctggggtccagctgtcctggctgaccttgccctcctggcccccaggactactgcggccagaactcctcactgggctcattcagcatcatcaccgagaacgtcccctgtggcactacgggcgtcacctgctccaaggccatcaagatcttcatgggggtgagtgctgctggccctggggacgcgtgagccctgcgggaccctcagaccagccagtgactgggcctctcctccgggcagaggacggagctgaagttggaagacaagcaccgtgtggtgatccagcgtgatgagggtcaccacgtggcctacaccacgcgggaggtgggccagtacctggtggtggagtccagcacgggcatcatcgtcatctgggacaagaggaccaccgtgttcatcaagctggctccctcctacaaggtgggctgcctccctgcctgccctgccccctcctggccagccccccaccccctgccctggtgtttgcaggacaagcccctgtcctccctccagcccctttttggagcccctgtgatgcttgtctcttgcagggcaccgtgtgtggcctgtgtgggaactttgaccaccgctccaacaacgacttcaccacgcgggaccacatggtggtgagcagcgagctggacttcgggaacagctggaaggaggcccccacctgcccagatgtgagcaccaaccccgagccctgcagcctgaacccgcaccgccgctcctgggccgagaagcagtgcagcatcctcaaaagcagcgtgttcagcatctgccacagcaaggtgggctggccgggccatggtggggcaagtaggcagaggagggctgtaggtgggctgtgactgtgggctggggccatgggcggggccgactaagcagagcagggctgtaggtgggctatagctgtgggcggggccatgggcggggccgactaagcagagcagggctgtaggtggactatagctgtgggcggggcatggcggggctaactaggcagagcagggctgtaggtgggctatagctgtgggcggggccatgggcggggccgactaagcagagcagggctgtaggtggactatagctgtgggcggggccatgggcggggccgactgtaggcagagcagggctatgggctgactgtgggcgtggtgagggtgccgtagagcatgctaatgaccagggcgtggtcatagcagggtagggtcttgggtgctcctggggctggggggcttctccacatgctccccacaccttcaggagtcgccctgctgcgtcacgcaccacacggcgcttgtcctccagctttggctctggccgctgcctcctttggtcacatgaccgtataatcggcctcccctctgagaccctgggctggacccccggcctccctctgcctccccaggctcagatattcacccggagggagaaaggacatgtgtcccccatgcccacacatccccagctacaggcagctggggaggacgggttctaggatggccatgttacagctgaggatgcagaggggttgggtgatgggtctgcacagccacggcgggacaggtgtctctggaccctctccccaaggttggccctgccggggccctggctggctggtgctgggtaatgtgccctgtcccaggagcagggccggcctcagggtcctgagctccagggcactggggaagtcctggctccatgagggcaggacgggcccaggacagaccagggtgttctccccaggtggaccccaagcccttctacgaggcctgtgtgcacgactcgtgctcctgtgacacgggtggggactgtgagtgcttctgctctgccgtggcctcctacgcccaggagtgtaccaaagagggggcctgcgtgttctggaggacgccggacctgtgccgtaagagcctgcccgaactgcactcagggccgggacgggggctgggaggtgctgtattgcgggccggggtgacactccttgtccatccaggtgatgggtgtgcatcacccaccctttccccgacttctccagtgtccttctttggggccctgtgggacccgggttggcagagcaagcttgatgcgtctgcgtcccagcccccgaccccagattcgccctcaccccggcccaggcctgagccctcctgcgtctgaccctggccctgtctcccccaagccatattctgcgactactacaaccctccgcatgagtgtgagtggcactatgagccatgtgggaaccggagcttcgagacctgcaggaccatcaacggcatccactccaacatctccgtgtcctacctggagggtgagcagggtggggcgggcttcagcgggggtgatggccgaggggcctggaggctgagtggggcagccctcgggagaggcaacagtccactggcctggagggtgagccaggcggccctcgggggaggctacggccgacgggcctggcactgtggggctgaaggctgatgtctggagacccatggggacacccggagggaggcctgaccctcagggtacccacagcccagggcagccaggctccccttgctgcaggatcaggagggaagcaggctatcgtggaaactgggagtggcaggggtgggaggtgctgaggttcgtgcagagcagggcgggttggggagcatttcaggcacaggtcaggggaggcccctgccgggtgctggtgtctgagctgagaaccagtgacgtgaaggagggactggtgggaagtttgggaggagtatcccgccatgggagaggaacatgggtcttgggactcagggctgctcggggggcccgatgagactgggcagggctcctcagcaggcagcgttcagggctcagtggggtggggagatccaggccctgcctttccaatccccggccttcccagaggggcatcctgcagagaagggcctgccagggtagggacggtgggtggggtgtggtggactgcggtggtcccaaccctatgccctgtgtccaccaggctgctacccccggtgccccaaggacaggcccatctatgaggaggatctgaagaagtgtgtcactgcagacaagtgtggctgctatgtcgaggacacccactacccacctggagcatcggttcccaccgaggagacctgcaagtcctggtacctaagcccacgtggcagggggcctgggggagctgcacatatgggcacatgagtacacacacacgtgtgagcacacagtgtacacagtacacagacacacaaccgttccacatgggtgcacatgcacacaaacgcacacagcataccacgtgcacacacacggtcacatgcatgcatggtgcacacatgcacacatgaatggatgccaacatgcaggcacacacagtcacacatgcacacagcgcacacatggacacatgcctagacgcagatacccaggcatacactcacggttacacactcacgcacatatgcatggatgcagacacgcaggcacacacggtcatatagtcatacaccacatgcacacatgcacagacagacacccaggcacacacagttacacagtcacacatgcacacatgcatggatgcagacacgcaggcgcacacacacatgcacagtgcacacgtacacatgcctagacacagatacccaggcacacacagtcacacatgcatggacacagagtcacatgtgcacacatacacacgtgtggacagacataggcacagtcacgtgcacacatgcactcacactcagtcacacatgaacatgtgctcacatgcatggacactgacacgcaaggacacacagtcacacatgcacacatgcatagacacagacacccaggcacacacagttacacagtcacacatgcatggatgcagacacgcagtcacacagtcacacatgcacacactgcacacatgtacacatgcctagacacagatatgcaggcacacacacatagtcaaacatgcacacatgcatggacacaaagtcacacgtgcacacatgcacacatgcatggacagacacaggcacacacagtcacgtgcacagatgcactcacagtcacacatgaacacatgctcacatgcacagacactgacacgcaggcacacacagtcacacatgtacacgtgcctagacacagatacccagacacacacaattacacagtcgcacagtcacacatgcatggatgcagacacacaggtacacaaggtcacacagtcatataatgcacacatgcacacatgcatagatacagacacccaggtacacactcacggtgacacagtcacacatgcacacatgcatggaggcagacacacaagcacacacagtcacacagtcacacatgcacacaggagccaggctacagaggtaccagtccctcactgcggcggggggtcttctgttctcatcccatcctctgggtctggctttttccttcctctcctcgcccctgctctgttcccacagttacaacccagtggggggctcttccggagctggctttggggcagtgcctgggggctttgggctcggtactagccacatggggaagctgggggtctgagcagcgtgggcgcgttgtcagtggagtgggacttgtagccatgtgcttgctttgcagcgtgtgtaccaactcctcccaagtcgtctgcaggccggaggaaggtaagctgccctctgctgccagccctgcggtggccgggcccatcctggggaagcctgtggggccttggatcggtggggggtgctggtctcctcctgggctctgcccctttggtccccccccagctcagacccacctccgatgtgtatcagccctggggggctgctgtgacccattttgtttcttctggggtgtcggtgtcctgtggggaatttccgtcaccctctcccgtgatccagcttctgcgttctgatgagattccctttattcaaagagaggggctctgggacgggtgcagtctcactggagcatttcttagctgcttgtgggggctcgggcacacctggccttcttcctatcttgctcctgatgaggtgattcttggcctcaccctcacccccaggaaagattcttaaccagacccaggatggcgccttctgctactgggagatctgtggccccaacgggacggtggagaagcacttcaacatctgttccattacgacacgcccgtccaccctgaccaccttcaccaccatcaccctccccaccacccccaccaccttcaccactaccaccaccaccaccaccccgacctccagcacaggtaaggccccctggttccctccatgcttcctcgggctctcaccttcccctgcatccagcatccagcacagagggctctttcgggggcaggccccggcctggtgcagccaggctgtgacccctgcacaccagctgcagagtgaggtgacagtggcattcctctgcactgaggtgtgagggggcctgccctggctcccctggcctggtgcattgagatagtagcatcctgaccacatccccaagcccagaccacagtggaggatcacctggggagatttctgaaaaccagcaggaaactatccctaagggttagagaaattttcttatgttcccctgcgtttgttctggttgaaatcctagctaccactgaacaagccaccaggggtatgatagccacagaaaaaagaaactttttttaaaaaaggcaagattttaaaagatcttgaactatataatgatatcctcttttcttcctgctttattgcagttttatcaacaactccgagtaagtgacggtgatgatattcatgatgacaagcagggtgggaggagcgaagtcttataaaatcacctgcaggatgcttccttcagggcccagatgtgaggctggcggggctggactcctctgcttatggaccaaagatggatgtattttggccacttcattcatggtttgctgaggccaggggctaaagtgagacctgattggctgtcggtgacaatattgctggttaagagtggagacaaagccccttccgtcacacttccttactggaatgggaagctctcttgttattgattctttgaaaaaaaagtattgaaaatagctgaggaaagggtccatcacacccaggtgtggccctgggtggccccgtctctttgggctcaggttttcagttgcaaaatgaggatggaagtggtgtccagccctgagctctctggccctgcactctggttttttggcaatgacagggaaaagagagattgcagctgggggatggtcatggaggtccctgggtcctctgaatcctggtggcttcctggaggtgcctctccccaggtgtgagagacaagaacttggttttgcttccctagagctgtgctgcctctggtctgactggatcaatgaggaccaccccagcagtggcagcgacgacggtgaccgagaaacatttgatggggtctgcggggcccctgaggacatcgagtgcaggtcggtcaaggatccccacctcagcttggagcagctaggccagaaggtgcagtgtgatgtctctgttgggttcatttgcaagaatgaagaccagtttggaaatggaccatttggactgtgttacgactacaagatacgtgtcaattgttgctggcccatggataagtgtatcaccactcccagccctccaactaccactcccagccctccaccaaccagcacgaccacccttccaccaaccaccacccccagccctccaaccaccaccacaaccacccctccaccaaccaccacccccagccctccaataaccaccacgaccacccctccaccaaccaccactcccagccctccaataagcaccacaaccacccctccaccaaccaccactcccagccctccaaccaccactcccagccctccaaccaccactcccagccctccaacaaccaccacaaccacccctccaccaaccaccactcccagccctccaacgactacgcccatcactccaccagccagcactaccacccttccaccaaccaccactcccagccctccaacaaccaccacaaccacccctccaccaaccaccactcccatcaccaccaccaccacggtgaccccaaccccaacacccaccggcacacagaccccaacaacgacacccatcaccaccaccaccacggtgaccccaaccccaacacccaccggcacacagaccccaacatcgacacccatcaccaccaccactacggtgaccccaaccccaacacccaccggcacacagaccccaaccacgacacccatcaccaccaccactacggtgaccccaaccccaacacccactggcacacagaccccaaccccaacagccatcaccaccaccactacggtgaccccaaccccaacacccaccggcacacagaccccaaccacgacacccatcaccaccaccactacggtgacaccaaccccaacacccaccggcacacagtccccaaccccaacagccatcaccaccaccactacggtgaccccaaccccaacacccaccggcacacagaccccaacatcgacacccatcaccaccaccactacggtgaccccaaccccaacacccaccggcacacagaccccaaccccgacacccatctccaccaccactacggtgaccccaaccccaacacccaccggcacacagaccccaaccacgacacccatcaccaccaccaccacggtgaccccaaccccgacacccaccggcacacagaccccaaccacggtactcatcaccaccaccactacgatgaccccaaccccaacacccaccagcacaaagagtacaaccgtgacacccatcaccaccacaactacggtgaccgcaaccccaacacccaccggcacacagaccccaaccatgatacccatcagcaccaccactacggtgaccccaaccccaacacccaccactggaagcacggggccccccacccacacaagcacagcacccattgctgagttgaccacatccaatcctccgcctgagtcctcaacccctcagacctctcggtccacctcttcccctctcacggagtcaaccacccttctgagtaccctaccacctgccattgagatgaccagcacggccccaccctccacacccacggcacccacgaccacgagcggaggccacacactgtctccaccgcccagcaccaccacgtcccctccaggtaagcagagctgcttggttcctctggcctgggatgcttcttcctccccttgtgccgggcaggactgtcccaggaaggctcaaggcacgttctgggcgcctctctgcccacgaagcttggtcactgtgtgggcagaagccactgacactggccagtgctgggcagtgaagccaaaggccattccgcttgcccataggacagccttctgaggagctgctgacaccggccagtgctgggcagtggagcccttggctatcctgctcgcccataagacggccttcttcaggggcccactgctatgtgatgcggtgctgtgggagcccatcaaggctggggggcagagagaggctgccagtgaggtgcctgcgggtccacctgcttctggctgcagcccctccttggggccttttcctggtggacggcgtgccacagccagtgccttctggacgcctcttgctggccatcggcttggccagcaagctgtgttgctgccagagcaccaggtcacctgcaggctctcgtgacactcggctgtggtgatactggccttgccgctccaccctgcctggtgactctgagagcctgggaggtgggcacgaggccctggtcctccagttctgccacccggtcggctgtctggctcccttgcagctggggagtggcagttgggaccctgtggcatctgagatgtgcaatgtctcagccctcactggtgtctcctgctctcacaggcacccccactcgcggtaccacgaccgggtcatcttcagcccccacccccagcactgtgcagacgaccaccaccagtgcctggaccccaacgccgaccccactctccacacccagcatcatcaggaccacaggcctgaggccctacccttcctctgtgcttatctgctgtgtcctgaacgacacctactacgcaccaggtactcaggctgttcacatcctgtgcttgggtggccgaggctggccccggcatgtaccaatgggtcaggtgccagggctgagatcgcagtagaagcgtctcaggaggcagcagccgtcgagggtggctgtgtccagggcacggcttcccttgggtggcctctgtggggacctccgctgtggggacctccacggggtccagcggctagccctgcctccggatagccctgcctctggacggtgtgatcgtgggtctgtctcccttcgcaggtgaggaggtgtacaacggcacatacggagacacctgttatttcgtcaactgctcactgagctgtacgttggagttctataactggtcctgcccatccacgccctccccaacacccacgccctccaagtcgacgcccacgccttccaagccatcgtccacgccctccaagccgacgcccggcaccaagccccccgagtgcccagactttgatcctcccagacaggtcagtgggctgcaggcggctttgtccccatggcactctgcgcagcatgtccgggcagctgaggccccaggcaccacttcctgctggtcgtctgagggccgaggcctccagcaacccttgggtgcagggtctgccgagccctccacattttcaccgtgccccgctgtgcctggcgaggtggctggctgcagtgaggtccgtggaagccacttcggcctccagcctcccggctcagcacccgcccctcctgagcgcagaccaccccatcctgtgccggtccccctgacgtcccttgcctcccgtccccaggagaacgagacttggtggctgtgcgactgcttcatggccacgtgcaagtacaacaacacggtggagatcgtgaaggtggagtgtgagccgccgcccatgcccacctgctccaacggcctccaacccgtgcgcgtcgaggaccccgacggctgctgctggcactgggagtgcgactgtgagtccggggcccccaggccctccccgcatctcctgccctctccgtgggtgggggctgcagggcccgtctcccgggggcggaagggctgaggctccttgggcacagatcccactgaggtgttcgctgaggctgggtgacttctgagggtcttctcacagccctgcttttgcctcattgggtggggagggcctgggcaggtggagggcttgcctggtggagttagggctcctccctggaacaagggtgcttctgaggcaagagggggctgagttgaagtttgaaccctggtccgtcctgcagaatgggccactgtgggtgcgccagggcaagtgcagctcagacatccccgtgcccacgcacaggagtggggttttcaggccccagcttcctgctggctcttcctgactatgccccagcccagcccttgcacccgaccccggccgaggggcacaggtggcacggctcactccggctcccttgcaggctactgcacgggctggggcgacccgcactatgtcaccttcgacggactctactacagctaccagggcaactgcacctacgtgctggtggaggagatcagcccctccgtggacaacttcggagtttacatcgacaactaccactgcgatcccaacgacaaggtgtcctgtccccgcaccctcatcgtgcgccacgagacccaggaggtgctgatcaagaccgtgcatatgatgcccatgcaggtgcaggtaggcacagcgtggccacaggaggctggcatggaggcgggtgctgacatgggccccaatgcaccctggttccccaggggccagaggactgggctgtgggggtgccaaggcatagcctctcctagagctgggctagaaggtaggatggggtgggcgactggctccgggacatatcagctcttcctgcaggccctccaggtgtgtcctgggcccctcgagccctggcaccatgccacgctgggcacagtctctgcagcagaagctgcctcctgaggacagagtcagggacagggctctgcacacccttggctgagatgcccctacttgcaggggaatcattggttctgaggctcaggaggccccgggagcctgcgccgggctccacagtccccaggtgctcccaggagagctccttcactggctcacccatgggaccagggtctggttgggagcagtggagtggaagcaagaaagggggcaggaaagcggggtaggcagggccctctccctacatgtgtaggtcagagagcaggcggggtggggcagccctggagctctcacaaggagaggaccgaggcagctgcagctcccatggtgtgtcggccacaggtgcaggtgaacaggcaggcggtggcactgccctacaagaagtacgggctggaggtgtaccagtctggcatcaactacgtggtggacatccccgagctgggtgtcctcgtctcctacaatggcctgtccttctccgtcaggctgccctaccaccggtttggcaacaacaccaagggccagtgtggtgagttccgtgacccccatggcccccgaggcccccacggctcccaccgtcccctgtgcccccatgtcctgccccagggcgggtggccaggccaggctgaggctgaggctgcgtgtaaacacccatgggcctggctgtgggcctcttgccccgctgctcggggctgctgtggccatcacccgggttcagtctctgtgaggagccaacaggagggggcctggcctggtctctgccctcggccctggctggccggtcctgggcatctgggctggagaagggcagggcttaccctgtctgcaacgtggcctctctcactgatacaggcacctgcaccaacaccacctccgacgactgcattctgcccagcggggagatcgtctccaactgtgaggctgcggctgaccagtggctggtgaacgacccctccaagccacactgcccccacagcagctccacgaccaagcgcccggccgtcactgtgcccgggggcggtaaaacgaccccacacaaggactgcaccccatctcccctctgccagctcatcaaggacaggtgaccccgcccaggcctgcctgtggccacgacaccaataagctgagggcctctgtgccccagcccccagctcttgcaaagaggaaggaggcagcgcgtggggcctggcgctggggctgggaaggcacggagccgcggaaccaggatcaggcgctaggtcgccgtggggtccaggacccaggcccttgggttccacggggctgagctgctacgtgcggcctgtgcctttgctgaactccagtctctcctggctcccgggaaggtgcagggctggccgagtgtgaggcccggagtaaaccagtcaacccaggacagagctcagggctgatattgggagggcagatttgggctttgacagagagggggtgctcctaacgctggcagtcatggggggtcagcatcctgtccctggaagtataggggccaggtataggctgggtgtccatctgccagggttgctggagggggtcctgaagctgatgaccacatagacgtggtttctatctctgggagccgggctgcagagccaccttgctcggccatcccttggtctgtccctgagctgtccccctggctggcctgtcccttgaccctccatcagccacaggcgcctctctggcgggtgccggactccaggaggacagtccgggcagagacgctggggtagagagcaggggagaggcaggtgccacctgagtgtgacctgtgcctctccctgcacagcctgtttgcccagtgccacgcactggtgcccccgcagcactactacgatgcctgcgtgttcgacagctgcttcatgccgggctcgagcctggagtgcgccagtctgcaggcctacgcagccctctgtgcccagcagaacatctgcctcgactggcggaaccacacgcatggggcctgctgtaagtgcccatctgcccctgccctggagctgggggcctgcaggccagacgtggtctctaggctctgccaggtgctgtgcccagcctgaagctagacctagatgggctgcggccagggatgcagagatggcgggtgtgagaccagggctggggccatggggtggggaaggccaggctggaggggctgaggtgctggggcttctgccagcatcgctaaatgcaactgggtgcccaccacccagctcgggacaacctcgagggtggaggttgatgcccaggcagctggtcaccctcctccgtgtgtggggcactgggcagctgtcactcaagggggtccaggctcctccgcctgacatgaggcagccctctgacctctgcccatgtccctcagtggtggagtgcccatctcacagggagtaccaggcctgtggccctgcagaagagcccacgtgcaaatccaggtatgttgtttgagggtccaccaggaccgtgggctcgccttctgcagtgcggagggtggcatcatctgggcatagcagtcccacctgccagctccccagccccaccccacctgtctgacaatgccctcccgcccccagctcctcccagcagaacaacacagtcctggtggaaggctgcttctgtcctgagggcaccatgaactacgctcctggctttgatgtctgcgtgaagacctgcggtacgccacccactcacactgtcccctcctgcctccctcctgcctcctcctgggtgtccacggaggctgggaccaggacgctgaccaccccccacctctgatccctgttgcacaaggactctgctaacacaacttgtctcctgggtgtccatggaggctgggaccaggaggctgaccacccccacccctgctccctgctgcacaaggactctgctaacacaacttgtttcttccctcttcctaggctgtgtgggacctgacaatgtgcccagagaggtaggccccaccgtgttgctgggggatccttccacaaattctgaattctggggagtgagggatggacatgaaaacctggagcctcaaagattgaggaatgaggtcatctaagtcctggatggctgagttggcatggacaccacccactcacccacccatccttccacccacccactcatccacctgtgcacccatctacccactcacctacccctccatccttccacctacctagtcatcacccactcatctatgcacccccccacccacccactcatccatccatccatccaccatccacctacccaaccatccacccatccatccaccatccatctaccatccaccatccacccaaccatccaccatccatccatccacccatcatccatctaccatccacccacccacctatccatccatccatccaccatctgtctaccatccacccacccactcatccatccatccatccaccatctgtctaccatccacccacccacctatccatccacccatccatccatccatccatccatccatccatccatccatccacccaccatctgtctaccatccacccacccacctatccacccatccacccacccatccatccacccaaccatccaccatccatccatccatccatccatccaccatccatctaccatccaccctcccatccatccacgcatccacccaaccatccatccatccatccaccatccacccaccatccacccatttatccatccattctccctccctccattcaccacccattggtcatatgatactctgtctagaagctctgacatgacatcttggccacctctgtgctgcccatgcctcctacctgtggtagcagccatgtggatgattccttagctaaattctgtacaaacctgagaggcctgagtggagaatttgccacgtgccaagcccctgcttgtcgatgctggtgagcaggtaatggctttgtgatatcagtgaatgagcagctactgtcctatcccagaacctgcctggtgtgctcagaagtgaggagggacatggttttcccccaggatccctcagcactctgctcagggtggctgtttctccccgctgaccacagctgcagctccggggctgtggtgaggtggggcctgcctggtgccacctgtcctctctactcacccttctttccctgcagtttggggagcacttcgagttcgactgcaagaactgtgtctgcctggagggtggaagtggcatcatctgccaacccaagaggtgcagccagaagcccgttacccactgcgtggaagacggcacctacctcgccacggaggtcaaccctgccgacacctgctgcaacattaccgtctgcagtaaggccatcccctggggcccatgccacctctcaggggtgcacacatccctgtaggctgggctgcctgctgtcccctccttggcaagtgaggaaacagctggcttgggggcctctgctgtgccccttgagagggcttgggagggggccgctgggcccagtccaggcatccctgctgcagggcctgacctgggtggggaggggacccttggaggtgctggaggcccgaccctgtgcagtggccccgggggctttgcctgggaggagccaccctcacggccgcgtgcgcaccctgtcttcagagtgcaacaccagcctgtgcagtggccccgggggcttggcctgggaggagccaccctcacggccgcgtgcacaccctgtcttcagagtgcaacaccagcctgtgcaaagagaagccctccgtgtgcccgctgggattcgaagtgaagagcaagatggtgcctggaaggtgctgtcctttctactggtgtggtaagcagggctggtgggcagggcagggaggaggctgccgcccggggtggggtggctgtaagggggttggctccctcctgggggtctcagattctggggacacagatggctgtacgcttggctgatgcacccaccccagccctgagcgctcgctccatccactgggtgtgcaccgggagtgggggtctggccaggtggccgccccggggcagtctccaacgaacggccttctccgttctttctcccaagagtccaagggggtgtgtgttcacgggaatgctgagtaccaggtgagccctgggctgggtgagagggaggaggggaggaggtcggctgcagcgtgggggtcctggcaggctgttgggctggctgggatgctggagaggcccctgcctcatgtctctccctgtgcccgaagcccggttctccagtttattcctccaagtgccaggactgcgtgtgcacggacaaggtggacaacaacaccctgctcaacgtcatcgcctgcacccacgtgccctgcaacacctcctgcagccctgtaagcggccaccctcctccttcagcctgcccttttccctcctcccagacaagcacccgggcccatgtctgcatcgtgaccctttctttcctcctttcaacgccaacctgtccctgtccccacctctccatcctgacacctgcccagcctggggcctcctccaggtgggggggtctcggcagccctgcaggctttgtgtggtgtggggtacagcctgggagttcagttgcagtggcgtgtctatgtgcgcagggcttcgaactcatggaggcccccggggagtgctgtaagaagtgtgaacagacgcactgtatcatcaaacggcccgacaaccagcacgtcatcctgaaggtaggtgtgcactgccggccccgacgcggccgggttgcttgagcccagggcaaggcgcgggccacccaggatcccccagctgagtcctcccagtcctgggcgcagctgtgatgggcgccctggggctgccatgacaaatgagcaggcgtcttcagggcagaaagggattctcctggttctgcggcccagaaatccatagagcaaagggcctcagggctgtgctccctcggaggcgctaggcaaggacctttcccagcctctggtcactctaggtgccccttggctgtgaccacgaggtttccttccctgtgtctgcctctcctctcccttttaaggatttaggcaccccaagcaggatgatctcatcttaggatccttcacttaatgacaccttcaaagaccccctttccaaggcaggtcacattcatagattcagagttagaacacagacagacctttgagggttgtgtgggctccaggctggtgcctgatgtggggccccgcccatgtcacttgtcctgtggccctgggcctcaccaggaagcctccccggccaggtgtctccagggtgtcttcctggccgggctggggctgggcctgctgccctccctcaccagagctccctgccccacagcccggggacttcaagagcgacccgaagaacaactgcacattcttcagctgcgtgaagatccacaaccagctcatctcgtccgtctccaacatcacctgccccaactttgatgccagcatttgcatcccggtgagttggccacctggggcctggctgtgtgtactctgccgggagtgggggtgcctggtgttctggggggctggggccccagtgctgcgacagtgacctcgggcctggtctgagctgccgcaggaggctttgcctggggctttctgcagcagctacccccgcccacggcatcgtgggaaggtgctctcatccccaggaatgtccgggggtcccgggctcattctcctttccctctagggctccatcacattcatgcccaatggatgctgcaagacctgtgagtacagggcacagcctggggggtaggcagggtgggggcacaagggctggtgccctcagccccgcctggggtggctggaggctggacaacggcctctgggtgggcagtgagggctgggggctgaggccgagcctggggaggggacgcagcgagggagagcctcctcgaagatgtggaggccctgccctaagccgctgcccgctctccccaggcacccctcgcaatgagaccagggtgccctgctccaccgtccccgtcaccacggaggtttcgtacgccggctgcaccaagaccgtcctcatgaatcattgctccgggtcctgcgggacatttgtcatgtgagtcccaggctgggagtgtgcctggagggggtggtggagaccccagggaggcgagaggccagcgctggccccggaaggtcacccctcactccgccctccccccaggtactcggccaaggcccaggccctggaccacagctgctcctgctgcaaagaggagaaaaccagccagcgtgaggtggtcctgagctgccccaatggcggctcgctgacacacacctacacccacatcgagagctgccagtgccaggacaccgtctgcgggctccccaccggcacctcccgccgggcccggcgctcccctaggcatctggggagcgggtgagcggggtgggcacagcccccttcactgccctcgacagctttacctcccccggaccctctgagcctcctaagctcggcttcctctcttcagatatttattgtctgagtctttgttcagtccttgctttccaataataaactcagggggacatgctgt

SEQ ID NO: 785 - DNA, 19048 bp, Homo sapiens
ggttcctcccttcccaggcagagactgataaactcagcacttgccggagtggctcattgttaagacaaagggtgtgcacttcctggccaggaaacctgagcggtgagactcccagctgcctacatcaaggccccaggacatgcagaaccttcctctagaacccgacccaccaccatgaggtcctgcctgtggagatgcaggcacctgagccaaggcgtccagtggtccttgcttctggctgtcctggtcttctttctcttcgccttgccctcttttattaaggagcctcaaacaaagccttccaggtaagattcttgtcctttccactcctcatatttcattcatttgaggaaacagaaaaatgatagcccagggaggactggggaagtctgagccacctgtgtgtccacatgggagtgtcaggggtcaggagtgttctcaagaagcactgggaagaaagactaatgggaagacttgcagggaacagaaagggtggcagtgggcaaccaagacgcatgggatggacatgtccagatactgtgggacacgtacaggagtttgagaactgatgggttaggtctgcagagtgcagacagaagacatgactgctttcccctctgggactgtgagtaatggcagcagcactgggttagttcttacatgccattctctacgtcctgaagcgaaagagccatgctgtgtgttccacttgtttcagacccggactcaccctaagtttgtcagttaaaatggagagcctccctcttagggatgcagtttcaattgtggacgccaagttaatccttcaaaaataccttctagaccatttttcttagaaaatacacacatctccagcagtgagaggccctcttttttttttttttttttttgagacggagtctcactctgctgccggagtgctggagtgcagtggcatgatctcagctcactgcaacctccacctcccaggttcaagcctcagcttcctgagtagctgggactacaggcgcatgccaccaggcctggctaagtttttgtatttttagtagagacaggttttcaccatgttggccaggctggtcttgaactcccgacctcaagtgatctacccacctcggcctcccaaagcgctgggatgacaggcgtgagccactgcgcccagccaataatttcatttcactgttcctaaacgttgaaagtaatgcaggttctcatagagttaaaaaaaatacagaaaggtgaagcaggaagtgagggtctccctattatacctccacctctatccactcttcaaggtgaccactcttgacacttgagggtacacggaattctattattatgtagctaacactgctatagtatttactatgagctagcccctattctaagtgcttgatatacgttaactcactaattctcattattaggacactgagatacacagaactgaagtgattctcccaaggtcaccctgctagtatgcggcagggccaagattcaaacccaggcattttggtgccataccctgtgctcattacctttatgctatacaagcccgatagatagatgatagatagatagatagatagataggcagatagagagagagagagatagagagataggcagatagatggacagatagatggatagatagatggagatatagatatctatatatagtatggagatatatatacaatatatacgctatatattgatatactatatgtcaatatgtagcatgagagatatgtatatatagatatattgtatatatagatatagatatatacacatatatatcatatagatttacatatatatgcacaagagagcttatatatatatctcatatatacgtatatatacatatatatgtatctcatgctacatattgttccacaggttgaccttgtaagtcacactatatcatggacatctttccatgtcgggacatacaggtccactcccttctttcaacagttgcttagcattccacagggtaggtactgtttacttaaccaacccctatcaagtttctcacatacctttgagcacttgcgtaagtgatttccgggtagatttcttgaagtggaattgccaagacaatgcatatgtttacatgaaatgtcagtggacaccattgaattgttgtctcagaatgctacactgacaggtgcaagtttactttacctcccaggaccacactggctttcattagggttttgaagtcttaatcatcagataggtgaaagtgtttctctttttaatttgcatttctcagatcactgatgtattgagaatcttaactttcttagtcatttgtacttttctatgaatgacctgttcatatcttttcttcctttttattatttttttcatatttgtaggagctttttgtatattagggatattaacctttttatcatatatgttacaatacttctaaatgcagtgggataatttaggaatcagagagactgaagggttgaggaggatttattatcattattaaggtgcactggcccagtcacattaacatccaaaaaaactgagccccgaacaaagcgtcaggttaccttttaagcatttcgtggggcagggggagatctgtgcagggggaagcatattacagaagcaagaaacaaagacagttactcaattgagacatgcattacatcatttcttacttttcaaggaaaaatatgttttacgacttgagtttatctgcctagtgaccttgcagctacacagctgcagagacaaggtcttcacaatgcctgggaaagggagagataaggctcactggccacagacagaaaaacaggcaattaatttttaaaggattccacctctttttgtttcttagagggaattgggttttttttacatacatctgagtttttgcttacacattctttaatttcttttaattcctgtttcaaaatatcttcttcagcctgatatttgtttggttttatttcactgtttgtgatatcttttgtcatacagaagtaattgttacatcaataacatgtgtccatcttttcctttgtggtcaccggactttgtgcaatttttaggaaggtcattcccaaccctaatattatatacattttcttttacactttctattaatatttctgtacttttgttctttaagcttaataagaatccatcagaaattttcttttgtgtatgatgtgaatataggtttgtatttgttggaacacttgatcgcaactgacaaaaacccaagacaagctagcttagataagaagacaggggaggagagaaactcagagggttagagtcctcctggggcgatgttttggggtgggaatgggctgcctgagagtcactcatagtgaccgggcctggccttcccagcagatgccacatgccctggagttaaggggcaaatgttaagtagagcgatgcctggttctggtctagagatttctgaaggcaggaagttgttggaactgtccacgatgtaatgtacctgggaagaggcagaaccaccctgcccctccctcccaggtcttcacagcccagaaggcagtggaaggaaagttcagcacttcccggtgggagggcagagaccagaaccctcaactgcccagttacctgccggagcaataatgggacactcactccagaacagtgtttggggacactaaatgccgcagggggcagtgggagacgtgatcctagaaaggaccctcctgcggggattctcagtgtaaaggagaacccttccccagagaaaccacatttactaatgtgcagagaccaccaagtcagcaggggcccccaacatcagacagaagccgaaagaacctcagggcaggcagggaccccctagccccaccctccaagacaggcgctcacttaagtaaccataccagaggagttaacgacttgaaaaaagaggagttttctcagtgcctatgatttttactgcccgcctctctccagcttccccaatctccccctcatctcatcccccacgtctcccacccccactccctacctccagcagccaaggtctgagctctggcctggctggcttggtggaataaaagagcttagagccaggtagaacacctagtgtgtgtgtgtgtgtgtgtgtgtgtgtgtgtgtgtgtgtgtgtgtgtgtgtgtgtgtttatcatgtaattatatgaatttgtgagattacatgaattatgtaatttcttcatttatttttcgagatggagtctgggtctgtcacccaggctggagtgcagtggcgcgatcttggctcattgcaacctcacctcccaggttcaagtgattagcctgcctcagcctccagagtagctgggactacagacgcacgccaccacgctcggctaattattgtacttttagtggagacagggttttgccatgttggccaggctggtcttgaactcctggcctcaagtgatctacctgcctcagcctcccaaagtgctgggattacagcatgggccaccgcacccggccggcattgtcttatttgtctgtgtttcctcagtgctatgaacagggcctggacccagtggaggtgctttataaatgcttgttgatgaaagaatgaatttgtcaccttaaaaaacaggccaaaacgtttaaactttatggctctcaaaaactttagagtaagggagttaacttgagtaaattcatgctttatgcagagtactctgtcaatagattacaggatggatgatcgggggaacgtggttttagaggggatagtttagagaccattgcaacggtttaggatagcattaatgagaccgtgagcgaggacagtttgaacaggaagaaaggactgagaagaagtcagatcagctggacttggcaacaaataggatggtgggaggagtgtagcagaagaacttcaagacaattctgaggccaggcacagtggctcacgcctaaatcccagcactttgggagaccgaggtgggcagatcacctgaggtcaggagttcgagaccagcctgactaacatggtgaaaccctgtctctcctaaaaaatacaaaaattagccgggcatggtccggtgcctgtaattccagctacttgggaggctgaggcagggagaattgcctgaatccgggaggcagagcttgctgtgagccgagagcatgccacagtactccagcctgggcagcaagagtgaaactccgtctcagaaaaataataataatcaataaataaaaatacaaaagttagccaggcgtggtggcggttgcctgtaatcccagctactcaggaggctgagtattatcgcttttatcacaggagaatcgcttgaactcgggaggcagaggttgcagtgagctaagattgctctactgcactccagcctgggtgacacagcaagactctgtctcaaaaaaaaaataaaaaatacaattctatgatttcaaacccatcgggccatctctcatatcatcttaagacgcacccacgtgcatcatttgttcagtgatgtgtagatgtcatctaagactatgtctctgcttggcttccatagtctggtataaatatgttttggaagatctatgcttgttttagctttagagatggtaattaagagtgagctgtgtagcatggcccctgcacaaggatgacgtgcaaattcgtaaagcgttccattaaaaaaaaaaaaaaaaaagagtgagctgtaaaaacagacctatgggttctgtttgtcattttcttgttgtcactttatgttctccagcctggccagcatggcaaaattccatctctactaaaaatatgaaaattagccgggcacggtggcacatgcatgtaatcccagctactcagggggttgaggcacaagaatcgcttgaacctgggcactggcttccagtgagccgagatcatgccactgcactctagcctggacgacagagtgagactctgtgtccaaaaagaaaagaacagaactttattttctatcacctcctgatttctgattctgaactcccatccaccaagcttcaggaaaacttaatctcagctcttcttgcccctctgcaggatggtatcaagggctccaggacatctgatgcggtgccaaggcatgggagtgggacgctgacccttcgctattgagtagctgctgaaacagccattgttcctgccccttggctctttcaggtccacctggcttatgtgtgagagactttttttgggttttttttgttctgtttttttgaaaagccagtaccaaaagcttacataattgtatgattgcattcaaataacattcttgaaatgataaaattataaaaatacagaacagatgagtggtgtttctaggggttgaggagggggtggtgtaggaagaaagtggctgtggctataaaaggacaacatgagggacccttgtggtgactgttctatgtcttttttttttttttttaattcacatctttatttatcctaaaccttttaggtttagggtgtgatgggaatctttttttttttttttttttttttttagtatttattgatcattcttgggtgtttctcggagagggggatttggcagggtcataggacaatagtggagggaaggtcagcagataaacatgtgaacaaaggtctctggttttcctaggcagagggccctgcggccttccgcagtgtttgtgtccctgggaacttgagattagggagtggtgatgactcttaacgagcatgctgccttcaagcatctgtttaacaaagcacatcttgcaccgcccttaatccattcaaccctgagtggacacagcacatgtttcagagagcacggggttgggggtaaggtcatagatcaacaggatcccaaggcagaagaatttttcttagtacagaacaaaatggagtctcctatgtctacttctttctacacagacacagtaacaatctgatctctctttcttttccccacatttcccccttttctattcgacaaaaccgccatcgtcatcatggcccgttctcaatgagctgttgggtacacctcccagatggggtggcggccgggcagaggggctcctcacttcccagacggggcggcggtcagaggcgcccccgacctcccagacggggcggcggctgggtgggggctacccccacctcccggacggggaggctggccgggcgggaggacttttctttttttgaaacggagtctcgttttgccatccaggctggagtgcagtggcgtgatctcagctccgtgtgagacttttctgacactgtctgtggtcctgtcttcctaggctcaggattctttttttttccaggggtcttgttagacctttggaacactgccaggaagcagggtcctctgaccttggaactcacagatccctccttctctcatttccgccacccaccagagtaaaggatctttccaggggaaggacaatgatggtaagaagtagtaaagtccttccccctcataacttctccaagattgatctgtttcactacatcttgaacatgaaaccaaatcttaactgctggaggtatgggggtggggtggagagggaaacaaataacatttcaaaatagtatataattgtattcaaaagcatgacaggcgtagaaaagggatgcggctgttcatgccctgaggtactaacagtagattctttgaagggactgggataataggaggttgctatcctttcatgttttaaggcagtttctgctttttccgtaataagcacacattgcttttataaaaataaaaataattcataaaagttcacttctgaagactcaggagaaaaagactcagcttaggtaacccctacataccaaagtatccccccgagcagaactgcctccctaggctgtcaccactgcctcgcacacgtatgactaatatcataccgatgacactttaaggcagctgcttatactcatgtctgtttctcttatagactgtgagcctcttaaaaccagtgaccattgctttttttatctttaatctctagcagatacctctgaatgcctgtcatgtcatggctactcaatgaatattgcagaataaacattgcattgtgttgtcaagttctcgtagaactttccataagatgtctcatttagttggtttgttgttgttattgttgttgttgttttgagacagagtctctctttgctgcccagactggagtgcagtgatgcgatccctgctcactgcaacctccacctcgcaggctcaaacaattctcctgcctcagcctccagagtagctgggattacaggcgtgcaccaccacacccagccgtttgtatttttagtagagacagggtttcgccatgttggccaggctggtctcgaattcctgacctcaagtgatccgcctgcttcagcctcccaaagtgctgggattacaggcgtaggacatctaactttcaaaccagctgactggcattctggcccacagtgaattcagctaggcgaagggcatctctgagaatgctggggacctgtctgttcagggggagctctggaagctgtatccagccactgaagtatgatgagcagcaactgactcattttccttctgttttctctcgagtcccagaacataataacatccccactagaatctccccactaagattgaggtggctgaaaaccaccacacaggctttgatttgagaaaagaacactcagaataacaagagaaaatggatttctgccatttttttccagcatacaaagataattaaggcaatcatacagcttttagtcatggaagcagcgtatagacacatctaaagtcaaagtaaagtcgtaaaaataaagcattcattcacttttagaaaactttcaggattttccaaggaagataaactttggagtttgttttttgtttttgttttttttgagacagagtcttgctgtatcactcaggctggagtgcagtggtacgatctcagctcactgcaacctctgcctcccgagttcaagcgattctcctgcctcagcctcccaagtagctgggattacaggcatgcaccaccatgcccagctaatttttgtatttttaatagagatggggtttcaccatgttggccaggctggtctcgaactcctgacctcaggtgatccaccccccacccccacccccggcctcccaaagtgctgggattacaggcgtgaggcaccacgcctggccaactttagagttggaaaagaaaaagcagaatggctggtttctatctcacataagacaggagaccccgaagaactgatcaaataccaaaaggaggctggaatagccctcgtggacaccaagggggtcttgggaactccaggcccagctaacaatgtggggcacaggaggcaggagcagttcaaggtagagagctccacagcagggagtggagagggacacagggcagagcgaagtgttagtttgtcctcctttcaaggagaagcagcatcaaagctgtgggaaccaaacatgtaacctggaagaggaaagctcacccagccagggggcctgagataaaatgagggcaaagttgatggtggggactgagaaagagcccaggacttaaggacgtaagtagaggcgattctgtgtgaccagccattcccacataccaggcgcaactcacctgcagccacttccgctcgctctccatgccatagaaggcgggagcccaggtgcaaaattatttagcgaatcaaaggagtcttttcagctcttttcttatcctcctccataaaataatcttctactcatactggctttgttagtgagtgacctttccttggggtattttttcaaaattcagtttcagcctcttcaatatcctagtcaacttcaacattcctgtgttatctctcgtactgtattcttggaaaataccgctctctggccaataggtgtttcatggctgcaggcataaacgaactttgaaccttttgccatttcttcacttccaggttccccttggtgatgtacactgaagaatatagaaggcagctgggcctgggggcacatgcacctgtagtcccagctactcaggaggccaaggcaggagactcgtttgagcccgggaggtcgaggctgcaatgagctgtgaacgtgccaccagcctagacaacagagactcagtctcaaaaaaaaagaaaatatatatatacagagagggaggatgttgccagataactattttcctgtttcttttattgtgcgattcttgttcatgataaattgattgattgatttttaattattattattatttgagatggagtttcgctcttgttgcccaggctgaagtgcaatggcacgatctcggttcaccgcaacctccgccttccaggttcaagcgattcttctgcctcagcctcccgagtagctgggattacaggcatgtgccaccatgcccggctaattttgtatttttagtagagatggggtttctccatgctggtcaggctggtctcgaactcccgacctcaggtgatccacccacctcggcctcccaaagtgctgggattacaggcgtgagccaccacgcctggccattattattattttttaattgagatggagtcttgctctgtcacccaggctggagtgcagtagtgctatctcagctcactgcaacctctgccgcccaggttcgagcaactctcgtgcctcagcctccggaatagctgggattacaggtgcgtgccaacacaccaaactaattttttttgcatttttagtagagacggggttttgccatgttggccaggctggtcttgaactcctgacctcaggtgatctgcccgcctcggcctcccaaaatgctggctctataggcatgagccacctcacccagccaataaattcatttattaaagtgcaacattttatatttttacttccctagtagatcagaattatgcagttaagtcgctttttgttttggtatgacccatgattaatttgcctgtgcctctggactagaagtcattaatagaagaaagccttcccacaccccagcccagctcacagggtcaggaccacacagggccgaacgcgttgaatatggggcactcagcatatggatacaatttgagcatttagtaaatactgtgcatgagaataaggaaatgtctatctcaacacccacagccctagcaatcacaggtgtatttaattatagggaattaaatgaaacttaattacataattttgtcactacctggattattgctgtgacttcctgcaaaacctaaaggagtcatcaatcaattgtagatttgcggttgaataggccttccaggagtcactgcgccattcctgctgctagacagggttccagagaggagtgcattacctcttcagggtcagtgtggccactaagcagacggccagctgtccatgctatgtgtggcctgagatgtgtgatgtcaaaaaccacccctgcctcatcatctctccccgccacggccaagttaaggtgcctgccagccaggcagctacatccatgaaaatgttcgagatagggaaaatgtcattcagcagaattcctctctgccgagggctgccggagtttggaagggaagtttccataggcttcttgaggctgggggttgggaagtggaggtcagggtgaatccaccaagaggctttgctgggtaacaagagctgtttgttaaaccgggtgaacagcttggtttttgctgaatggcccacgtgagcttagaggttacactgagtagtcagaccaaggggagtggtgagcctcacacacacccacacagcactcagaccttctactaggcaaatgtggaatgaattgatcaagaatgtgttcttcactcactcaggtttctcactctgtgttgagtggcattctttcagaatggatattttgggggtgtcttcccagttcatgaaccaataaccccctctttctcttgaaagtgtcctcctcccatgcacagagtgggccccagaatgtcatgtagtatgtgaccgagacccctggaaagggatggagataggacccaagggggccacagtcttctgctagagtgaaaaattgggagaaaagggagtccacagtccccagtacaggtgttatggggtggccatcttccaccagcctgtgggttggagagcagaggaggcctgtctgcagagacagaaagagtagaagaaagctgattcagagggagaggtgagatagagacaaagccttagagagcgattcctggttccaagcccccccagaggctcaactacttcctgctcttgggttccttgaaacactttctattcttataataaatttttccttttctttttcttagttgaaaatgaaaaatacagaaagaattagggtttgaagcccattagccttttcgggatgctccatatctcagtccaaccctgtcctgaggcccatctctcctttctggttagaaatatctctcatccaagctacttctttgagtcatataacaaaggcagaggcattttctatgcaagtccagttaaaaatgtgtgtgtttaggccagacgcggtggctcacgcctttaataccaacattctgggaggccaagggtggaggatcacttgaggtgaggaatttgagaccagcctgggtaacagagtgagatccagtctctaaacacacacaagtgctcgcgcacgcgtgcacacacacacacacacacacacacacacacagagattagctgggcatggtggtgcatgcctgtagtcccagctactcgagaggctgaggccacaggatcgcttgagcccaggagtttgaggctgtagtgagctgtgattgtgccactgcactccaacctgggcgacagagcaagactctgtctcttaaagaaaaaaaaaaaaaaaaaattgggcgcggtggctcacgcctgtaaaatcccagcaccttgggaggccaaggtgggcagatcacgagatcaagagatcaagaccattctggccaacatggtgaaaccccatctctactaaaaatacaaaaaaaaaaaagagccaggcgtggtggcatgcgctgtaatcccagctactcggaaggctgaggcaggggaattgcttgaaccagggagatggagggtgcagtgagccaagatcgcgccactgcactccagcttgggtgacagagccagactccgtctcaaaaaaaaaaaaaaaaagaagggtttcaaggaggaaggatccctgggaggtaaggaggaagaactgtcagctgtcagccctttcctaacacccttgggaagtttaggcttcagtttcaaggtcagaatagagagtgcccccgctggagaccctgaataaatgtgttgctttgaggctgagaaaggctggaaataccacccagggtcagctgcagctcaggctaggaggccttaatggaggaagggcttgcataggtaatcagcctgcttcccatattgccttggccggccctgcctttctccagtgatcaaagacctttgtttcctgcctcgaataacaataatcgtgtatcacataggtccaaggtctgtgtcttattccaatttgtattcccagtgcctgcacagcacactgcacagaatagacatttagtaaacgtttgtcggatgagatgctctcctgtatgtcctatgtacatatctcaaattctattccgcttttgtttgaatctattttctggccaggcacggtggctcacacgtgtcatcccaacactttgggaggccgaggcaggtggatcactgggcaggtcaggagttcaagaccagcctggccagcatggtgaaacccccatctctactaaaaatacaaaaattagccaggcatggtggcgggtgcctgtaatctcagctactcaggggggtggggcaggagaatgacttgaacccaggagatggaggttgcagtgagctgaaatcgtaccactgcactccagcctgggtgacagagcaagactgtgtctcaaaaaaaaaaaaaaaaacaaaaaactacttatgcttctgacctgtttccacaatcttcagccttcatcaaaggttatctctgtccctaggcatcaacgcacagagaacattaaagaaaggtctctacagtccctggcaaagcctaagtcccaggcacccacaagggcaaggaggacaaccatctatgcagagccagtgccagagaacaatgccctcaacacacaaacccagcccaaggcccacaccaccggagacagaggaaaggaggccaaccaggcaccgccggaggagcaggacaaggtgccccacacagcacagagggcagcatggaagagcccagaaaaagagaaaaccatggtgaacacactgtcacccagagggcaagatgcagggatggcctctggcaggacagaggcacaatcatggaagagccaggacacaaagacgacccaaggaaatgggggccagaccaggaagctgacggcctccaggacggtgtcagagaagcaccagggcaaagcggcaaccacagccaagacgctcattcccaaaagtcagcacagaatgctggctcccacaggagcagtgtcaacaaggacgagacagaaaggagtgaccacagcagtcatcccacctaaggagaagaaacctcaggccaccccaccccctgcccctttccagagccccacgacgcagagaaaccaaagactgaaggccgccaacttcaaatctgagcctcggtgggattttgaggaaaaatacagcttcgaaataggaggccttcagacggtgagtttttgccaccacgccttccctctggctcccagctctgaagcccctcctgagaggaagcccagcccaccctctcctcacctcctgggctctgcttctagactttgtcttgtcctgccccaagctcattatgaggcagagctcagccctacaagactctgccccacttgtctttccaatgatggccacaatgggggaggaggagcaggcaggccccggacccctggtgtggacagcgtaagaggggtgagtgagatggggcctgccctggagctcctgaggcctggaggtcatccatctggggtgacagagtgtgatctactctggggcttggcccctgaatccccatcctctcgcgggggctgcaggggagggactcacagacaaggacaccccaacctcatgcccagctctgtcctccaggaatgccttgtcttccctgcaaagtcaattccacagccttcgctctctcccaaccctaaggaaacagtctgactgaaccacacccacccacatggtccttctcacctgtccttgcagaggggcagtgtccaaaatgtgtatgttgctgggtatagtggcatatgcctgtagtcccagctactcaggaggctgaggcgggaggatcacttgaggttaaagtgagctatgatggcaccactgcactcccgcctgggcaacagagtgagaccctgtcggaaggaaggaaggaaagacggaaggaaggaaggaaggaaggagggagggagggagggagggagggagggagaaggcccataaaatgcacacatttacacacatatgactggaagcatggccctgacagcacactggacacatgccacattcccaggatgcggcccctctcacacttacaaaggtgcatttgcatttttttttttttttttttttgagatggactctcgctctgtcgcccaggctggagtgcagtggcgcaatctcggctcactgcaagctccgcttcccgggttcacgccattctcctgcctcagcctcccgagtagctggaactacaggcgcccgccaccacgcccggctaattttttgtatttttagtagagacggggtttcaccgtgttagccaggatggtctcgatctcctgaccttgtgatccacccgcctcggcctcccaaagtgctaggattacaggcgtgagccaccacacccggcctaggtgcatttgcctcgatggccgagaacacccatttcccagaaccctcaggaccacaatgagcccagacaatgggaaggggagggtaagcagaccctgagaacagaatggaagaggtagcagaggccgcgccttccaaactgcgagccccagcccttgctgcagtggtgcagcccctggccgatggcctttctgggtctctcccttcctgacttcgtcctcctgtatatagacttgccctgactctgtgaagatcaaagcctccaagtcgctgtggctccagaaactctttctgcccaacctcactctcttcctggactccagacacttcaaccagagtgagtgggaccgcctggaacactttgcaccaccctttggcttcatggagctcaactactcctgtgagtccttaacccaggggaaggtgtgggtgcgcagtaggccggggcagagggcagagggcagctggctttctggtctgcctcttccctggggtttgccagacctgggaggaatgatgggtcggactcctgtccctcccagggctctgaatggagcacccccactcttgttccagtggtgcagaaggtcgtgacacgcttccctccagtgccccagcagcagctgctcctggccagcctccccgctgggagcctccggtgcatcacctgtgccgtggtgggcaacgggggcatcctgaacaactcccacatgggccaggagatagacagtcacgactacgtgttccggtaagctgtccccacccaagctccctctccagcccctctcctgccccctccagcccccctccagcccctctcttgcccctcttctgcagacatggactcttctgagagacccataggatgttccacgcctgcatctggaaggtggaattcctgggctctcgagagaatttccgcacataactgctgcctcccccatttctccttcctttccccatccacctacacaaatctccctcctctgctcacctgtcccgtctgattgtgtctttctgcacagattgagcggagctctcattaaaggctacgaacaggatgtggggactcggacatccttctacggctttaccgccttctccctgacccagtcactccttatattgggcaatcggggtttcaagaacgtgcctcttgggaaggtgagcaaagaggaaggagcctggccacacccagactctggatgagggagcacaggaggtgagaagggagaggagaggctttcatccggatggagtctgtggttggtacaggctcccctcctataagggcaggagtggggaggacagtcagaccagtccagagcagagcaagtgggcagtcggagtcagagctgggccaccctcggtggtggtcctgaaggcagtacttttggaccactccctgtccttggtcctcaggacgtccgctacttgcacttcctggaaggcacccgggactatgagtggctggaagcactgcttatgaatcagacggtgatgtcaaaaaaccttttctggttcaggtacccactgtcctcctgccatccccttatcccaggctgagccatgtcatgagtggctctaaagggttggacaggtggggacagccttagctatcacctggagatgggataccagtcatgctcatgaccctgacttggcccaccccagaccaggtaagggagctgagtctgaatgaccccttcctaaccacaggcacagaccccaggaagcttttcgggaagccctgcacatggacaggtacctgttgctgcacccagactttctccgatacatgaagaacaggttagagcagaaagcacgtgacacgtagcccaggtccctgttatccttgcagcctcctgacagttgggggtttggggcatttcacaggtttctgaggtctaagaccctggatggtgcccactggaggatataccgccccaccactggggccctcctgctgctcactgcccttcagctctgtgaccaggtaaggctccactgcagctgcagaaatacctggagaaacagctcctgggctattcctgggcctgttcagcataggacagtgcatgggctgggtgcccacatctgctgggaaagagggtgggcatgagtatgggtgcatgcagttatgcgtgcgtatccagggacctgcacccagacccctagggacggagccagggaaaagaacccccacccctcaacacagaattagccatgagaagaagcctgggcaacagcaactacaggccgtgtttctcctccaaccgtgatgtaggtgagtgcttatggcttcatcactgagggccatgagcgcttttctgatcactactatgatacatcatggaagcggctgatcttttacataaaccatgacttcaagctggagagagaagtctggaagcggctacacgatgaagggataatccggctgtaccagcgtcctggtcccggaactgccaaagccaagaactgaccggggccagggctgccatggtctccttgcctgctccaaggcacaggatacagtgggaatcttgagactctttggccatttcccatggctcagactaagctccaagcccttcaggagttccaagggaacacttgaaccatggacaagactctctcaagatggcaaatggctaattgaggttctgaagttcttcagtacattgctgtaggtcctgaggccagggatttttaattaaatggggtgatgggtggccaataccacaattcctgctgaaaaacactcttccagtccaaaagcttcttgatacagaaaaaagagcctggatttacagaaacatatagatctggtttgaattccagatcgagtttacagttgtgaaatcttgaaggtattacttaacttcactacagattgtctagaagacctttctaggagttatctgattctagaagggtctatacttgtccttgtctttaagctatttgacaactctacgtgttgtagaaaactgataataatacaaatgattgttgtccatggaaaggcaaataaattttctacagtg

SEQ ID NO: 786 - DNA, 86570 bp, Homo sapiens
ctgcagccatgggtgccctatggagctggtggatactctgggctggagcaaccctcctgtggggtaagtcagaccaagaccctctccatgtccttgttccaatctggggaactctgcgtgggtccacgccttccatgtgtgcctcctccacatgtcaccccaggctagctgagacaggagagaggcccttaggctctgcagggggatgtggtagaattcaccaattctcacccttttctggatgggagcacaggcaaaaaccttagtccccaaactcaagtgtgcaagaactttcttggttttctgcaactcaactaaggttttgactctgagcctcattctgctaagttgatggaaaatttcacgaaagtcattcttggagggtgttgtccccacttctcccagggatgtgtccagaactaaaattttggataaagccaaagtactggggggaggatgggatatgaggaccctctcgtcaccagtcagcatccatctaggttacttttgaaatgtccattgttcctgatcccctggccccctgggatatccttcaaagccccctttatatggaaggtggtcattccatagcccccacactctcttcaagattccttagacctctctctcctcagccccagggacgctcttcctagttgggggtggtcagaagcccccactgccatctatttctaggagacaattcattcacccttccataatccccttcttctctttatccccttttcacaaacccccaagtcccattattattattattattattattattattattattatttgagatggagtttcactcttgttgcctagactggagtgcaatggtgtgatctcagctaattgcaacctccacctcctgggttcaagcgattctcctgcctcagcctccctagtagctgggattacaggcgccccatgccaccatgtccggctaattttgcatttttagtagagatggaatttcaccacgttggtcagtctgctcatgaactcccgacctcaagtgatccacccgcgttggcttcccaaagtgctgggattacaggcaagagccaccgcgcctggcccccacaagtcctattaagacaaaaaccagctgggtacagttggtcacgtctgtaatcccagcacttcgggaggctgatgcaggaggatcacttgagcccaggagttcaagaccagcttgggcaacaaagtgagaccctgcctctagaaaaaaattaaaaaatgagccaggcacacagtgcgtgcctgtggtcccagctataccagaagctgagacaggaggatcccttgagcccaggaggttgaggctgcagtgtgttgtgtttaagccactgcactccagtttgtaaaaagatggaaatcatacactggcagcagagtacatccaccttgagccccaaagtgcttaaaacaattgtgggttggagatttcacatgaaaattcagatagccacattctctttaaaaacagaaagaacggccaggcgtggtggcttacgcctgtaatcccagcactttgggagaccgaggcaggtggatcacctgaggtcaggaatttgagaccagcctggccaacagggtgaaaccccatctctactaaaaatacagaaattagctgggcgtggaaaccgggaggcagaggttgcagtgacccaggatcgcgccactgcactccagcctgggtaacagagtgagactccatttcaaaagaaaaaaaagaaaaaatacaaaagttaactgtgcctggtggcgcacacctgtagtcccagtactcgggaggctgaggtggtagaatcactcgaacctgagaggcagaggttgtggtgagccgagatcgtgccactgcactccagcctgggtgacagagcgagactccatctcagaagaaaaaaaaaaagaaaaacaggaaggtcttacaatttaaaaaagctcacattctttcattataacaggtgaaagctagtaccaacaatccactttttttttttttactagtttatatatttttaaaatttttaatttttatgggtttgcatttatggggtacctgtgatattttgatacaggcatacagtgtgtaatgataaaatcagggtaactagggcatccctcacttcaagcatttgtcatttctttgtgttaggaacattccaattccactctcagttattttaaaatataccataaattatcgtcaacaatagtcatcctgttctgctaccaaatactagattttatctattttatctaactgtttaactgtatttttgtacccattaaccatatctacttatcccccagtccccgctacactttccagcctgtggtaatcatcgtaaccatcattttactctctatttctatgagttcatcagttaaaaattttaaattcccatctatgagtgagaacatgtgaaatttgtctttctatactggcttatttcacttaacatcatgtcctccagttccatccatgttgttgcaaatgacaggatctcattccttttttttttttttttttgagaccgagtctcactctgttgcccaggctggagtacagtggcgcgatcttggctcactgcaacctccgcctcccaggttcaagtgattctcgtgcctcagcctcccgagtagctgggattacaggtacatgccaccattcctggctaatttttgtagttttggtagagacagggtttcaccatgttggccaggctcgtcttgaactcctgacctcaagtgatccacctgccttggcctcccaaagtgctgggattataggtgtgagccactgtgccgggtgatctcattcttttttatggtggataattctccattgtttgtatgtaccaaatttcctttatccactcatctgttgatggacacttaggttgattccgtatcttggctattaggaatagtgctgcaataaacatgggagagcagatgtctcttacatatactgacttcctgacttggaaggaaaggaattgctggatcatacagtagttctagttttagttttctgagaaaccttcatattattatcgatagtgattgtactgatttacattcccaccaacagggtaacagggttcccttttctccacatgctcagcagcattcattactgcctttcattaggataaaagccattttaactcgagtgagatgatatctcactgtggttttaatttgtgtttctctgatgattagtgatgttgagcattttttgatatacctgctggccatgtgtatgtcttctttgagaaatgtctattcagatcttttgcccattttaaaatcagattaatccgggcgtggtggctcacgtctctaatcccagcactttgggaggccgaggcaggcggatcacttgaggtcaggagttcgagaccaacctggccagcatggggaaaccctgtctctactaaaagtacaaaaattagccgagcatggtggcgcatgcctgtaatcccagctacttggaaggctgaggcaagagaatcacttgaacccaggaggcggaggttgcagttagctgagatcgtgccactgcagtccggcctggggtgacagagtaagaccccatctcaaacacacacacatacacacacacacacacacacacacacacacaaatcagattatttgatttttttcctattgagttgtttgagctccttttatattctggttattaatcccttgtcagtaccatctagaaatgctactgatttttgtatgttgattttgtatcctgcaaatttagtgaatttgtttatcagttctaatagctttttgatggcgtctttaggttttttttaaatatcagattatatcatctgcaaacaaggataatttgacttcttttttttttttttccagtttggatgcctttatttctttctcttgtctaattgctttagctaagatgggttgtatatattttctcttattctgtcagttgtgtcttcactttgtggattgtttcctttgctgagcagaagctttttaggttgatgtgatcccatttgtccatttttctttggttgcctgtgcttttgatgtattacttaataaatttttgcccagactaatgaactggagagtttcccaaatgtcttcttgtagtagtttcgtagtctgaggtcttagatttaagtctttaatccattctgatttgatttttgtatgtggtgagagataggggtctagtttcactctttgcatatggatatccagttttcccagtaccatttatcttcaataaatgcaatgtatgttcttgggatctttgtcaaaaatgaattcactgtaggtgggtggatttgtttctgggttctatgttctgttccactggtccatgtgtttgtttttatgccagtaccacactgttttggttattatagttttgtagtataatgtgaagtcaggtaatgtgattcctccagttttgttctttatgctcaggatggcgttagctattctgggtattttgtgtttccacacaaattttgggattagtcttctatttctgtgaagaatgtcactggtatttttatagagattgcattgaatcggtagattgctttggttagtatggacattttaacaatattgtgtcttccaatccatgaacatggaatatctttccattttttttggtgtgtgtcctcctccatttctttcattactgttttatagttttcattgtagagatctttcatttctttcgtttattcctaggtgttttattttatttgtggctattgtaaatgggattactttcctttttttttttcagattgtttgctgtaagcatatagaaatgctactgatttttgtatgttgattttgtatcctgcaagtttagtgaatttgtttatcagttctaatagcttcttgatgaagtctttaggttttctgttttttttgttttgttttttgttttttgttttttgagatggagttttgctctcgttgcccaggctggagtgcaatggtgccatctcagctcggtgccatctcagctcactaccatctctgcctcccaggttcaagcgattctcctgcctcaacctcccgagtagctgggattacaggtgtctgccaccatgccaggctaattatttttttgtatttttaatagagacaggttttaccacgttggtcaggatggtctcaatctcttgacctcttcatctgtgcagctcagcctcccaaagtggtgggattacaggcttgagccactgcacccagccaaagttgtttttttttttgagacagagtcttgctctgtcatccaggctggagtgtggtggtgtgatcttggctcactgcaacctccacctcctgggttcaagagattctcttgccccagcctcccgagtagctgggactacaggcatgtgcaactatacccagctaatgtttggtttttttttagtagagattgggtttcgccatgttggccaggctggtcttgaactcctgacctcaggtgatccacccacctcggcctcctaaagtgctgggattataggcgtgagctaccaagcccagctgtcttcaggtttttctaaatataagattatatcatctgcaaacaaagataatttgaatgccctttttccagtttggatgccctttatttttttctattgtctaagtggtttagctaggactaacaataatatgttgaagaatagtggtgaaagtggacatccttgctgtgttccagatcttagagcaaaggctttcagtttttccccattcagtatgataccagctgtgggtctgttgtacatggatttcatcatgttggggtgtgttccttccgtgtctactttcttgagagtttttatcacgaaaggatgttaaattttatcaaatgcttttctggcatcaattgaagtgatcacatagtttttgtcctttattctgttgataagatgtatcacactgatggatttgcataagcaacaacccactttagatggtataggagtgcttcagttccacagtcgcccctccgggactgtttcacacatttatatttcttgcctggccccatcagcattggagtttgagggccctgtctaaggtgtttagatttttgaaaaacaaaagccaggaaggcttgtagacgaaagctgcatgaatcagaagaaaggaaagagaagggtggtgggggaaagcccaagttaatacttcaacatgtttctgggtgcagagcaaaagtggggaggattggataagtggacccacaactgtattttctcaaccaggattgacccaggaggcttcagtggacctcaagaacactggcagagaggaattcctcacagccttcctgcagaactatcagctggcctacagcaaggcctacccccgcctccttatctccagtctgtcagagagccccgcttcagtctccatcctcagccaggcagacaacacctcaaagaaggtcacagtgaggcccggggagtcggtcatggtcaacatcagtgccaaggctgagatgataggcagcaagatcttccagcatgcggtggtgatccattctgactatgccatctctgtgcaggcactaaatgccaagcctgacacagcggagctgacactgctgcggcccatccaggccctaggcaccgagtattttgtgctcacaccccccggcacctcagccaggaatgtcaaggagtttgccgtggtggccggtgccgcaggtgcctcggtcagtgtcacgctgaaggggtcagtgacattcaatggcaagttctatccagcaggcgatgtcctaagagtgactctacagccctacaatgtggcccagctacagagctcagtggatctctcggggtcaaaggtcacagctagtagccccgtggctgtcctctctggccacagctgtgcgcagaaacatacgacctgcaaccatgtggttgagcagctgctacccacgtctgcctggggcacccactatgtagtacccacgctggcctcccaatctcgctatgatttggccttcgttgtggccagccaggccacaaagctgacctacaaccatgggggtatcactggctcccgtgggctccaggcaggtgatgtggtagagtttgaggtccggccatcctggccactctacctgtctgcaaatgtgggcatccaggtcctgttgtttggcacaggtgccataaggaatgaagtgacttatgacccctacctggtcctgatcccagatgtggcggcctactgcccagcctatgtggtcaagagtgtaccaggctgtgagggcgtggccctggtagtggcacagacgaaggctatcagcgggctgaccatagatgggcatgcagtgggggccaagctcacctgggaggctgtgccaggcagtgagttctcgtatgctgaagtggagctcggcacagctgacatgatccacacggccgaggccaccaccaacttgggactgctcaccttcgggctggccaaggctataggctacgcaacagctgctgattgcggccggagtaagtaatggaaatgtcccctggtcctgtccacctggtgaccgcttttccacccacctactcctctgtggctttcgggatcctgattgtcctcccctcacttctcttctccgcgacatccttcctcaagtcttctcagcccctcccatccgcccagaaacaatattctaaatatttagcaaccagggagagctggggcactaccagtcagaagagacagcagccaaagcactgtgacagggtcctgaagcccccatcatgctggcatcagcccctgtctgttggtttgttctggaaagggccctaggggagagccagggtgctgagaaggagggatctttggggttgtgggggacagtcaggtcagcagcttctcaccaaccagtttggaaatattttgatattttagcaactgacatagccacaccagttgctaagccactctccacacctcatgtaggaatgttgatacccaaacttaggagatctaaatgtatgataataagatgactacgcgttggggaggggagtatcttgcaatctttctaggtgtttcacgtgtttttgacacagttaatgtatatgacctggcagtttgtgtgacctcaggctcagcccatgagacgctgtcagtgtagtgcagggtcccagggttcaaatcccagctctgctgtgtgatcttggacaagtgacttcatctctctgggcttcagtttccacatctgtaaaatggggataactgtttctccctcaaaactttgttttagagacagggtgtcactctgtcactcgggctggagtgcggtggtgtgatcacagctcaccgtagcctcgaactcttggactaaagcaatcctccctcagcctcccaagtagctgagactataggcatgcaccaccacacccagctaatttttaatttatattttgtagagatagggtctttccatgttgcccaggctggtctcaaattcctgggctcaagcgatcctcctgcctcagcctctcaaagggctggaattacaggcctgagccaccacacccagctgcaaaaacttttgaggactgggaggcagatggaggaaagctgtttcttcccatgtagtccctgccacgctaagactctggcattcctggacctggcaaaaatgcccctcccctcccctccaaggcatggaagccacccaacttcaaggagccactttgggcttgagaaatagaatgagggagcggtgggtgattaattataatgggtaacactccacttaacacgtaggttcagttctaaagctttctcgagttttagcttatttaatcctaacaccccccaccaagatccctacgaaggaggtattattatcacccccatgttacaaatgaggaaactgaggcagagggagtttaaaaccacttgcccagtgtctcagagccagttggttgagccaggattcctacctaggcggcctgactccatagtccttttcatcctgctgaaggctgtcttccattttctgtccttaaaaaaatcccttagctctttttgaccctggagggaaggtagggaagaggggaaaagggggagagaaaaacacaaattaacattttaatgaccgtttctgccttttcttatttactgccttcccttcttctaggctgccctgtgttaaactggagaatcagaaaacatggggctctcagagaggcctgagcaactctctccctgtggggttccagacctcggtttccccacctttaaaatgggcaaaaatgggcaaaaatgggcagttgtgagcgaattgctcaagcttccccggcaaggtgggctccaggatgcctccctctgaggcctgaggcggtttcttccttcttccttcttcttccctcctcctcctcctcctcttcctcctcctcccccttccctcttcttcttcttcttcttcttcttcttcttcttcttcttctttcttctttcttcttcttcttcctcttctttcttctttttttctttgtgagacagagtctcactttgtcacccaggctggagtgcagtggtgccatctcagctcactgcaaccttcgcctcctggggtcaagagactctcctgcctcagcctcccaagtagctgggattacaggcatgtgccaccatgctctgctaatttttgtgtttttaatggagatggggtttcactatgttgggcaggctggtctcgaactcctgacctcaagtgatccgcccccctcaccttggcctcccaatgtgctgggattacaaccccgcggacacttctgattctctcttttcaccgttcccttccctccccagctgtactgtccccagtggagccctcctgcgaaggcatgcagtgcgcagccgggcagcgctgccaggtggtaggcgggaaggccgggtgtgtggcggagtccaccgctgtctgccgcgcccagggcgacccccattacaccaccttcgacggccgtcgctacgacatgatgggcacctgttcgtacacgatggtggagctgtgcagcgaggacgacaccctgcccgccttcagcgtggaggccaagaacgagcaccggggcagccgccgcgtctcctacgtgggcctcgtcactgtgcgcgcctacagccactctgtgtcgctgacccgcggtgaagttggcttcgtcctggtgagtacctgggggctttggggggttaacatccatgagctgcgggtccgaaggcggaggcaaagcccaatggccgacctcaaaccagggtgcagggaagtgggccatggagttggagggtggggaggcggatttgaaaatcagtagcaggaccttagaaccctgccctccagccatcccacgtctagaaatttaaaggatattcagagacagagactggggggtaacatgccaacatggtttataatagcataaaacaaaaacaaacaaacaaaaaattatccagcaatgggggatttacgttgaccaaataactaaatttaatgagcacctgctatgcaccagatatgtttcttagcacttttctcatcttaacgaatttaatgctcacaaactcagtgcaggaggcattattattatgaacatgttcagattgggaaactgaggttgagataggctagtgacttccccagggctcagagctagtaagaggtggagctaagggcacaggcatgctggctctggagtccttgttcttaatccctcagctgtcctgactctggtaaatgcatttctattcagttcatatgaataacagcagcctagagcaattacttcctttttctcgccatgttattatgaaaatattaaaatgtccaaagttgaaattcttatacagtgaatgctcatatgccaatcgcctagagttttctttctttctttctttcttttttttttttttttttgagatagagtcttgctgtgtcacccaggatggagtgcagcggcaggatcaggttcaagcgattctcctgcctcagcctcccgagtagctgggatgacaggcatgtgccgccatgcccagctaatttttgtatttttgtagagaggggtttcaccatgttggccaggctggtctggaactcctggcctcaactgatcggcctgcctcagcctcccaaagtgctgagattacaggtgccaatcatctagattctaaacactgtactcttcttgattgatcacacactgatccatcggttcatccctctgtccattccacaatctctcttattttttatgcacttcaaagttccagacatgagtacatatcacccaaaagacttcaccatgtcattaactagaatataatattttcacacttcttttggctgattttggaggtgaaatttatatataacaaaaatcacaaatcttaactgtatagttcacctttggcaaatgtgtaaccaaattgcccattaagatacagaatatttttatcacctgggaaaattccctcatgtgccttaccaaacagtccccaacctactcctggagatgatcacaattctgattttttttttccagcatagattagttttgcctgttcaataacttcagggccaggcgcagtggctcatgcctataatcccagcactttgggaggcctaggtgggtggatcacttgaggtcaggagttagagaccagcctggtcaacatggtgaaaccccatctttagtaagagtacaaaaattagctgggcgtggtggcgcatgcctgtaattccagctacacgggaggctgaggcaggagaatcgcttgaacctaggaggcagaggttgtagtgagccaagattgcaccactgcactccagcctgggtgacagagtaagactctgtctcaaaaaaaaaaataaataaataaaatatatatatatatagagagagagagtatatatgtgtatatatatatatatacatatatacacacacatatatacatgtatatgtgtatatatatgttgtgttctctactttgctttttgcatttagcaatacattctgaaacagtttctctatcaacagtttctctatcagcctctatttttttttaacatctgcacaattctttatatggatatgaacaccatggttcattcaaccagtcccctgtggatggacacattgttcactattacaaacaatactgcaatgaatatttttttgatttttttttttttgagacaaggtcttgccctgttgcccaggctgaagtgcagtggtgtgattatagctcacttcaacctcaaactcctgggctcaagcaatcctccagccttggccttccaagtagctgggactacagtctcatgccactatactgggctaagtatttttatttttagtagagataaggtcttgctatgttgcccaggctagtctcgaactcctggtctcaagtgatcctcccaccttggcctcccaaagttctgggattagaggcgtaagcccctgtatctgacctgaaataaatattcttgtacctccctgattttgtgagtgtgcaggtagatctctgcgattaataatcagttggtgaaaggaggtgttcttcagccctggaggggttgagcacaagttcaggcggacttcagatcccttgaaattatatacagaattttatacctctctctgaaaactactttttattttttttgagacggagtctcgctctgttgcccaggctggagtacagtgacgtgatctcggctcactgcaacctccgcctcctgggttcaaacgattctcctgcctcagcttcccgagtagctgggactacaggcacatgccaccacgcccggctaattttttgtatttttagtagagctggggtttcattgtgttagccaggatggtcttgatctcctgaccttgtgatccgcccaactcggcttcccaaagtgttgggattacaggcatgagccaccgcacccggcctttcatttttttttccgtcagatcctcacagaggtcagtgacttgacaaaggtgcagagctactgtcagaatcatagtaggatactcacaagacattgttaggagaggagttaatgaaatagtgacttcagcatggtctttttttttttaagtgtaaatatatctaaaggtaggaaaaaactcaacaggatctatacatttgtatgtgtctgcctacagggtgattttcttttctcatttttgctcctgtgcattttcagttttctgtaatgaacgaatattatttgtgtcatttaaaaatggagattggctgggcatggtagcttacgcctgtgatcccagtactttgggaggctgaagctggaagattacttgagcccagaaatttgagaccagcctgggcaacatagggagaccctatctctaccaaaaaaaaaaaaaaaaaatagctgggtgtggtggcgcctgcctatggtcccagctacttgggaggctgaggcaggaagatggcttgagcccaggaggtcgaggctgcagtgagctatgatgctgccactacactccaggctgggtgacagagcaaaactgtctcaaaaaaatacataaataaaaaaatagaaaaattaaaatggagatcactggacttaggggagaaacagatttgagcagccatgctggactgagagctctgagcatggggccatggcctgtctccatcactgcagtgtctaaagcaccagctggcacagagcaggccacacagtgggactcacagaagctttgctgggagccggaatgagtgaatgctctgtcttccttctgggccattgctcatgctgtcctctctcctgttgctccttttatcatattccatcctcttggctaagacttctccacttcaagtctcagctctggcacagctcagagaatgtgtaaggaaagagtaagaaagagatgcccaggctgggtgcggtggctcacacctataatcccagcactttgggaggccgaggtgggaggattgcttgagccatgagctccagaccagcctggacaacatagtgagacccccatatctaatttaaaaaatttttttattaattaaaaaaaaaaaaggctgggtacggtggctcatgcctgtaatcccagcactttgggaggctgagcaggggtgggcagatcacttgaggtcaggagttcaagaccagtctggccaacatggtgaaaccctatctctactaaaaatacaaaaattagctggacgtggtagcaggcacctgtaatcccaggtgggagaatcacttgaacctgggagacagaggttgcagtgaaccgagatcgtgccaatgcagcccagccttggtgacagagcaagattccatctcaaaaaaaagatgccccagggcacagagagacatagttcttatctcctggttcttagtcagacttcaggcttctccagagcctgggaggcttataaacaacacaacctcgtctctgtgttctggaggctggaagtccaagatgaggtcaccagcactgccaggttcaggtgagggtgctcttccaggttgcagatggcctacttctccttgtatcctcacacggtggaaagcggatctgagagctctctgaggcctctgtcataagggcactaatcccattcatgagggtgccaccctcatgacctaatcacctcccaaaggcctccccccactcttaataccatcatgttgggtgttaagatttcaacatccctgaccagcaaggttagatctggccatttttctaggttttcacagcctcctatctccccactatcccagctctgaaccctcagcctgtacctcccctatcccatccttgacccctctgcctgggcctttctgatcctggccttgacttttctgcctgtgcttctcccatctctgccctgacccctctgagctctcactgtctggtgatgtgtctgtttctcccaatggactgggagccccatgagggtagggcttggggctgtctccgccaccttcgtattcccaggatctcccagctcaaggccaggcacagagtgagtgcccagtgaatgtttattaaatgcagcagtgacttaattcacttagtgagtgcctgggattctaccaggccctgttctatgcactggggataaagcagtgatcaaagcagacccaaacccttgtctttgtggagctgccattctgatggagtaagacagatgataaacatggtcaatttgtgaattatatttcagaaggccagatgctatagaaaaaaaaggaaagcagggaaggaggctatggaatagggagaggctgccttttttttttttttagacagagtctcactctgtttggcacgatcttggctcactgcagcctccacctcctgggttaaagcaattctcctgccccagccaactgagtagctgggattacaggcgtgccccaccacacccagctaatttttttatttttagtagagacagggtttcaccatgttgaccaggctggtctcaaactcctgacataaagtgatccacccgcctcagccttccaaagtgctgggattacaggtgtgagtcactgcgcccggcccaaggctgccatttaaaaaggggtgtaggctgggtcccatgggtcatgcctgtaattctagcactttgggaggctgaggcaggaggattgcttgaggccaggagttgagatcagcctgggcaacatagcaagacctcatctctataaaacaaaacaaaacaaacaaaccataaaataaaatcataaaatagggcagtcagggaaggcttgagtcagtgacgtttgagcacatactctttttctatattctcctatttaaaacttttaattaaaaagtactttaatgagggctggaggccagatggcacaggggcctgaccacctcctcttcacccactctgcaggttgacaaccagcgctcgcgcctgccagtctccctgagtgagggtcgcctgcgtgtgtaccagagcggaccacgggccgtggtggagctggtctttgggctggtggtcacttatgactgggactgccagctggcactcagcctgcctgcacgcttccaagaccaggtgtgcgggctgtgtggcaactataatggtgacccagcagacgacttcctcacgcctgacggggctctggctcctgacgctgtggagttcgcaagtagctggaagctggatgatggggactacctgtgtgaggatggctgccagaacaactgtcccgcctgcaccccaggccaggcccaacactatgagggcgaccgactctgtggcatgctgaccaagctcgatggccccttcgctgtctgccatgacaccctggaccccaggcccttcctggagcagtgtgtatatgacctgtgtgtggtcggtggggagcggctcagcctgtgccgtggcctcagcgcctatgcccaggcctgtctggagcttggcatctcggttggggactggagatcaccagccaactgccgtgagtgatgccctgggtgggggctgggagcatacagtgaggggcaggagatccctagcatctgcttaatatctgagaagttattatggttcagcctggtgctgggcaatgccaggggcctagtgatggccaagacagccagctctgtccacaatgagcctaaggttggagagacgtttcactagacattgacagtctggaggggtccaggcaggatggggaggcccactcggatgggttggggccaggatgggagagagacaggcagatgagtcagggctgggattgcgggggacacaggcagaggggttggggccaggatggaggaagtcagtggggctatgggaaaccagaggaggttcctggcccagcctggggagcaggggtggtcagggagggttttctagagaaagatgtccaatttgaaacccataagaggggctggaagttgccaagagaaagaggaggaagtgagttgcaggcccagagaacagcatgctcaaaggcttggcaggacgggaattcttgtctgcagaatcccaacacagagacgtgacgtctcttcctttgcctatagccctcccatgactcccattgccctctagataaagtccaggctctttagccaggtgtccgtctgcttaatcgttcactcattcattccacaagcattccttgaacccctgcctgccccctgtgcatgctaatgatattgaagacacagtgaagaccagcataaatctattcctgcccttgtgagtgaggctcctagagacatgtcccagaggcagaaaggacaggtaggagggaggaagaggcatccaggcccaggcccagagggagggggagtaagtacagggcagacatagaggccactaggtgtttgtcttggccagttctgtgtccccactgcccagtaagcacccccccaaccccatgcctggcgcaaaataggaatcagagagttcatttattctccctttcacttctgcagtatttcctgagcacctgctgcgtaccaggccctgtccttggtgctggggactcagcagtgattgagacagatcaggtccccactcccgcagaacttctctcttagcggcaggggagggacacagacagtgagcagatgaactaggaagtatcttcagagaggcaaagaaacaagttcattcaatgacagtgactgtgaggctcgtgaagagggtgatcagggaaggcctttctgggcaggtaacattggagctgagaccagggtcaggcaatggagtcagctaagtactaactaacagtgatgtccacagaatgtttccccatagatcaactcatttaatcctcacaacaaccctgtgaggtctcgactacattatcccatcttactgatggggaaactgaggcacggggagattggagtcagtggccgagaaggagagatctgggatctgaacccaggccacctgggccccagtgggctttctggggaaagggaaggcagagggaacagccaatgcaaaggccctgaggtgggagggtgaggacccgggaggaggaggcagctggggctggggcagagtgagcccgagggagagggagaagaggtgagggctgagaggtgagaggaacagatggcacagggcctcctgaggcatggggaggactctggcgtttaccctgagtgagaggaagccacagtagtgctctgagatggggagggacctgatctgacccagatgttcccagattcctcggcctggtgtgaggaacaggctgtgggggcaggagggagcccaggcaggaggctgctgcggtggataggatcagaggcagattctgtaactgggtggatttttttttttttttttgagacaaagtcttgctctgcgcccgggctggagtgcagtagtgtggtctcagctcactgcaacctccgccttccgggttcaagcgattctcctgcctcagcctcttgagtagctcggattacaggcctgcgccaccactcccggccaatctgggtagattttgaatatggagctcacaggacttgctgacagattggttgtccagtgagcgttagggggttggcggggtggagattaactgcgtcgctggggtgtggcgcaggagcacccagaagaatggcagtgccattatctgagatggcgagctctgagagaggagcagggtttggggatggaattcctgggcgccgtccccgacagggcgctcttcgacggcccctgctacgcgggcctgatccaccctctctgatctccccgcagccctgtcctgccctgccaacagccgctatgagctctgcggccctgcttgcccgacctcctgcaacggggctgcggcgccgtccaactgctccgggcgcccctgcgtggagggctgcgtgtgcctcccaggcttcgtggccagcggcggcgcctgcgtgccggcctcgtcgtgtggctgcaccttccagggtctccagctcgctccgggccaggaagtgtgggcggacgagttgtgccaaaggcgctgcacctgcaacggcgccacccatcaggtcacctgccgcgacaagcagagctgcccggcgggtgagcgctgcagcgtccagaacggcctcctgggctgctaccccgatcgcttcgggacctgccaggggtccggggacccacactatgtgagcttcgacggccggcgcttcgacttcatgggcacctgcacgtacctgctggtcggctcatgcggccagaacgcagcgctgcctgccttccgggtgctggtggaaaacgagcatcggggcagccagactgtgagctacacgcgcgccgtgcgggtggaggcccgcggggtgaaggtggccgtgcgccgggagtaccccgggcaagtgctggtgagcgacgtggcgcccagggctgggtgacggagcaggaaataccctctgaagacttggagttctggatgggcctgagggtgggggaggcctgttagaagattttatttttttcgttttcctttttcctttttgtgcagaacggagtcgcactaagttgcccaggccggtctccaactcctgggctcaagtgaccctcccgcctcagcttcctgaagtgctaggaagtgagctatgatcgtgccactccattctggcctgggtgacagagtgagacccctgtctctattttaaaaaggaagctagtggctgggcaccgtggctcacgcctgtaatcccagcattttgggaggctgaggcgagtggatcatctgaggtttgagaccatcctggccaacatggtgaaaccccctctctactaaaaatagaaaaaaaaattagccaggtgcagtggctcacacctgtaatcccagctactagggaggctgagagagaatcgcttgaacccaggaggcagaggttgtagtgagccaagattgtgccactgcactccagcctgggcaacagagtgagaccctgtccaaaaaaaaaaagaaaagaaagctagtatggttgcagcagcctgagtgagagggacagtgagaagaggtgaggcgagggaggtaatggggagatagacagatcatgtaggttttgaaggccatgggtgagggatttggatttaagctggtgctttaggaatgaagaggggtgaatggtgagccaggcagagggaacagcaagtgcaaaggcctcgaggtgggactgagcgtaatatgtccaagagaatagcaaggaggtcagggtagctggaggtgagtgaattgaagggtgggccacagaactgtgaataccctgaccaggtggccctcttgcatctccacccaggtggatgacgtccttcagtatctgcccttccaagcagcagatgggcaggtgcaggtgttccgacagggcagggatgccgtcgtgcgcacggactttggcctgactgtcacttatgactggaatgcacgagtgactgccaaggtgcccagcagctatgctgaggccctgtgtggactctgtgggaacttcaacggggacccagctgatgacctggctctgcggggtgggggtcaagctgccaatgcactggcctttgggaacagctggcaagaagagacgaggcccggctgtggagcaactgaaccgggtgactgtcccaagctggactccctggtggcccagcagctgcagagcaagaatgagtgtggaatccttgccgaccccaaggggcccttccgggagtgccatagcaagctggacccccagggtgccgtgcgcgactgtgtctatgaccgctgcctgctgccaggccagtctgggccactgtgtgacgcactggccacctatgctgctgcatgccaggctgctggagccacagtgcacccctggaggagtgaagaactttgccgtgagtatcggaagtggcaactgggggactcagccttatatatattcattaatgtataaatatcattaattcatttaatccttataatagccctatgaggtagggattgtggttatacccatttaacagatgaagaaattgaagttcagaaaggttcagttacacacctgggatcatgatagctagaaaatcacagatggtgggcatgcagttggtattttttttttagatggagtcttgctctgtcaccaggctggagtgcagtggcatgatctcggctcactgcaacctctgagtctggttcaagctattctcctgcctcagcctccagagtagctgggattacaggcatgcgccaccaagcccagctaatttttgtatttttagtagagatggggtttcaccatgttggccaggatggtctcgatctcctgaccacgtgatccgcccacctcagccttccaaagtgctgggattacaggcgtgagccaccgtgcccagcggcagttggtatttgtaaaatgactgagtacacctggtggcccagggtctgattcccacataacagctgtcattgagatatgagcaacagtattgtcattaggagtctcatcccctctctggttctttttggtccccatctatcctacctcgcttatttacatctgcctgaccccttgggcagtcagtttgagagccttgtttcagaggtgggtgcatgaatggttttccaacacctttgcttgcctatgaaagaagtttgaaaagccatgcatcctctcacctgattttttttaagatggggtcttgctctgttgcctaggctggagtgtagtggtgcaatcatagcttactgcagcctggaactcctgggctcaagcgattctcctgcctcagcctcctgagtagctgaaacggcaggcttgcaccaccatcccccgctaatttttaaaatattttttatagagacagggttttgatattttgcccaggctggtctcgggctcttgggctcaagcaatcctcctgcctcggcctctcaaaatactaggatgacaggtgtgagccatcgtaccagtttcctctcacccgatttttaatttaaaaaatttattattgaaatataatacagatatttaaaaatatgtacatatcataagctaacagcttgatcagttttcaccaagagaacaaacctgtgtgaactgtcccaaattcaagaaaaaaaaaaaatccaggttcccaaccccaagaggtaaccactattctgacttctaaagtttttgaattttggaattaatagaagcatacatgtctagtttttcacctgaaataatcataaaacttataatttctaacaaatggtaacttttgacttttaagaacctttttttttttttttttttgagatggagtctcactctgtcacccaggctggagtgcagtggcacgatctcagctcactgcaacctccgcctcctgggttcaagcaattctcctgcctcagcctcccaagtagctgggactacagacgcccgccaccatgcttggctaatttttttggtatttttagtagagagggggtttcaccatgttggccaggctggtttcgaactcctgacctcaagtgatccgcccaactcggtctcccaaagtgctagaattacaggcgtgagccactgctcatggccttaagaacatttttattagggaaaaatttaaacatatccaaagtaaactaggatagtgagccagcatatatccatcatttagtttccacaattatcaacataatattggtatttcaaaatgaaaccattacttgacttatgctcctcttttaaatgtattcaacagatacatagcacacagtggtacacatcattgtccactgaaaaatacaggataaatacatcattcctttttctccttcaacttacattcattcattcaacaaatatccaaaacattcaaaaataccttctgtattccaggcactattctaaacactccggatacaataggggagagaataagaaaacaaatccttgcctttctgaactgattttctaatgctttttagttctaacagaatttaacctaatgtaacacatttgaatgcatggaagtcttttgttaaagtcactgtatcagctggcttttggtgcctaacaaacaacccaaggcttagtggctgagtgcattaaaacaagtgtttatttttatttatttatttatttatttatttatttattgacatggagtctcgctctgttgcccaggctggagtgcaatggtgtgatctcggctcattgcaacctccgcctcctgggttcaagtgattcttctgtctcagcttcccaagtagctggaattacaggcatgtgccaccatgcccggctaattctttgtatttttagaagagatgggggtttcaccatgttagccaggctggtctcgatctcctgacttcaggtgatctgcccgcctcagcctcccaaagtgctgggattacaggtgtgagccaccatgcccggccaagtatttattctttctcatgattctgggggctgctgagctgttctcccagcctgggccagcttggttgatctctgcagtctgttggaggctcagccaaggccgggtaatctagggtgattttacacatctggcagttgtcaagctggttggtttggggggccctcagctgggaattcttgtctctgctctacttggtctcatcttccagcaggtgagccaaggcttcttcccaaggtgctctcaagattcctaagagcacacaagccccagtgtgcaagcactttccaaggctctacttggtatcatggtggccaatgtcccattggccaaagcaagtgccatggtcatgcccagagtcaagacgtgaccattggcagcctgtgtcacaatcgccatcacacttctctgccacaaacatacacatctatgactaagatttcagaatttttataatcccagctactcgggaggctgaggcagaagaatcgcttgaacccaggaggcagaggttgcagcgagccgagatcaagccactgcactccagcctgggcaacagagcgagattctgtctcaaaaaataaaataaaataaaataaaataaaataaaataataacagtgcagtctccactcatcccaaatctcaacacgtggcatgttgccctggggtgtgaaacctcccaggacaaaacagccttcttataaaagatataagaagttttagaaattcctgagactctaagactctaagtggtttttttaatggagtaagatatcattgcaagaattgtttgtgcacaattgataaaaatattaaacagaagtaaattgtaatggccattgtaatggcatcactcagtgagcttacccccacccaatatttcacatatattgttagaatgagacagggttcagcatcaattctaatcctatctttcatttttgtagatatgatatttatttatttttgagataaggtattatcctgtcaccgaggctggagtccagtggtgtgatcacagcttactgtagcctccatctttgggctcgagtagtcctcctgtgtcagcctcctgagtagctgggactacaggtgcacactaccatgcctggctaattttttattttttgtagacacaagatctcgctatgttgtccaggctggtctcaaactcctgggctcaagccttcctcccgccttggcctcccaaagtgctgagattacagacttgagccacagctcctggcttacatgatattaataagtgggtgggagtggacagagtgcaggtggagtaacatcactccgtgctctgaaccccttctgagtcatagggaaggcacacagtgagacacgacaaatttattttatattatctgtgagcagccaattctattaggccctccttttgatttattactcaataatgattcagcattcgttgtgttcacagcgatagcaatatttgaaatcgtccgtttatgtcctcagaggtttcacactccagggcactgtgccatgtgttaagattcaggatggggctgggtgtggtggctcatgcctgtaatcccagcactttgggaggctgaggcgggcagatcacttgaggtgaggagttcgagaccagcctggccaatatggcaaaaccctgtctctacaaaaaatacaaaagttagctaggcctggtggtgagcgcctgtaatcccagctacttgggaggttgaggcaggagaatcttagcttaaacctgggaggcagagattgcagtgagccgagatcgcaccactgcactccagcctggcccacagatcgagaccctgtctcaaaaaaaaaaaaaaaaagattcaggatgggtgggggactgcactgttctcttctgtaaagtgcaggaagcacacttgtgaaggggacaggtggacaatgggaagtgggaatgctcttctaacagagcattcttgggctgtccttttaggcaggacacgtataattccagctagcagttgtgtgacacgcatcccactgggcaggtcctgttctaagggtttctcattgaatcctcacaaccaccccgtgaggcagaattgctcttattcctattttacaagacgaggaaactgaaccacagagatgttaaggaactagcctgaggtcacacagccggtggggtgatttgaacaggctggctcctgattttgtgctgttaattatcagactctgtggcctgtgtggaaattgagaatctcttgtttccttaaaactactcctttccttgtaccacctggaagttctagaagactggatcatgaggtcttagatatgcagacggaggcctgacccagcttgaacaattattggtattttgccattcttagttcctctacctctcactccaccccctcttttttggtagaatattttagatcaaattctaggcagatcagttctcctctaactacttcagtaagcatctgcttttcagcaacaaaaaaggacttttaaggcacaggagtttgcttttcatgcctgtaatcccagcactttgggaggcctaggtggaaggatcgctggaggccaggagttcaagaccagcctgagcaacatagcaaaacccagtctctacaaaaataaaaataaagaataagccgggcatggtgactagtgcctatcatttcagctactcaggaggctaaggtgggagaatatcttcagcccaggaggtggaggtggcagtgaggcgagactgtgccactgcactccagtgaggccctgtctctaaaaaaaaaaaaaaaaaaaggaaggaagaaagaaagagatatgagggcatgtggtaattaccagtaacaacaataacattaattccctaacatcatgtaaagcccaatctgggttcaaattttcccaattgtctaaaaaaaaaaaaaggtttttttctattttgtttggctctagaaccaaaccaaatacacatactgcattggattgatctacctctttgcttttactctgtcagaatttccttcctttgttcctcccaacatagtattatgaaaattgtcaaatatacaaaaaagttgaaagaattttacagtgaagacccataaacctaccacctggactctacactctaattctttttcttttcttttttctttctttctttctttctttttttttttttttgagatggagtctcactctgttgcctaatctggagtgcagtggtgcaatctcagctcactgcaacctccgcctcccgggttcaagcgattctcccacctcagcctcccacgtagctgggattacagatgtgcgccatcatgcccagctaatttttgtatttttagtagaaacgggttttaccatgttggctaggctggtctcgaactcctgacctcaagtgatcctcctgcctcggcttccaaaaatgctggggttacaggtgtgagccaccgcgcccggcctcttcactctaattctaattcattcatttgccttatcacatagctatccctccatccagctcttccttttgtctatgtcacttatttactgggaaagataggttatttatcctgcagaatttcatactttcaggatctggctagttgctattttggagtgttattgaacttgtccctatgtccccatgattctcctgtaagctggatgtcagcttcagaacagcaccacccagcagaacttcaatgatgacagctccatatttgagctgttcaaatacataccaggtcaccacaggtcacatgtggctgctgagcacttgcaatgaggctgttgtgactgaggagctaaatcttcaattttgtttcattttaattaacttacatccaaatggtcacaagtggctagtggctactgtatttgacagcacagatagagatttaatgtggtttagttttagtcacttagatttgctttttatggagtgactggagtttggggaggggagcagggaggtttttctttttttctttataacactggctaaatattttaattactgctatagaaggaagaagctaaaagtattgcattcacaaatattgcatagattatacaaacacagaaatatatgcatatgcatgtttaaaatatatgccacatatcaacaccatgtatccaacttgaataaggtcattaaagacataatagaaggctgggtgtggtggctcattcctgcaatcccggcacttcgggaggctgaggcaggtggactgcttgagcccaggagtttgaggccagcctgggcaacatagcgagaccgcatctctataaaaaatttgaacagttagccaggcatgatggtgcacgcctatagtcccagctactcaggaggctgaagtgggaggattgcttgagcccaggaggtcaaagctgcagtgagctgtgatagcaagcaccaccgcgctccagcctgagtaacagagcgacccctatctcaaaaaaaaaaaaaaccataatagataactccaaaccatagttaaattgggaaagaatcttaattatcaggatcagattaactgcgatgtaatgtgttccccaagcaccctgcaatgggaccgcttgtgtgtgagtgtctttgagcatctgtgtgtgcatacgaatgtgttgggggaccgcttgtgtgtgtgtgagtgtgtttgagcgtgtgtgtgcatatgaatgtcttgggggaccacttgtgtgtgagtgtgtttgagtgtttgtgtgcatacgaatgtgttgagggaccacttgtatgtgagtgtgtctcgaactcctgacctgggagcaggaattcttgatcttgatgtctcctctccctgcagcactgagctgcccaccccacagccactatgaggcgtgttcctacggctgcccgctgtcctgtggagacctcccagtgcccgggggctgtggctcagaatgccatgagggctgcgtgtgcgatgagggctttgcgctcagtggtgagtcctgcctgcccctggcctcctgtggctgcgtacaccagggcacctaccacccaccaggccagaccttctaccctggccccggatgtgattccctttgccactgccaggagggcggcctggtgtcctgtgagtcctccagctgcggaccgcacgaggcctgccagccatccggtggcagcttgggctgtgtggccgtgggctctagcacctgccaggcgtcaggagacccccactacaccaccttcgatggccgccgcttcgacttcatgggcacctgcgtgtatgtgctggctcagacctgcggcacccggcctggcctgcatcggtttgccgtcctgcaggagaacgtggcctggggtaatgggcgagtcagtgtgaccagggtgatcacggtccaggtggcaaacttcaccctgcggctggagcagagacagtggaaggtcacggtgagagcagatggggaacagggggccaggggcctgtgggtgggtgggacacaggccgcgctcagcccaggagttgggggcacagagatgagagtgcatgtgcgaggcctggggtccctgaggacagaagatgccagtcagaacccagagtgggaagccaatgagggaggtgtcatcagggacttgggagctgctcccccatctctgtccctaagtctgcaccctctcttcacctccatgcattgacttttctttttcttttttttttttttttgagatggagtatggctctgtcgcccaggctgcaacgcaatggtgcgatctgggctcactacaacctccgcttcctgggttcagtggattctcctgcctcagcctcccaagtagctgggattacaggcgcccaccacaacacctggctaatttttctatttagtagagacagggtttcaccatgttggccaggctggtcttgaacgcctgaccttgtgatccacccgccttggcctcccaaagcgctaggattacaggcgtgagccactgcacctggccgcattgacttttctctccaaatctctcccactctctcctccctcccgcttcatcctctcctcacctcaatcctggattctgccctacccacctccctagtctgccactcattggcaggatgtgataccatcagaggttgggaaaaatcaagtctggagaagcttcatggacagaggacaatctgtgggtgacactctcaccgccttaacaacaacaacagcagctatagtttctatacagctgactgcacaccttttggctgccaggcacttcacgtccatggtgtctgtatgcttccaacaggggctgcaggcactatgacttgctttatttttcagagtgggacggcccatcactggcccatagtcccccagcaaaggtggagcttgaaccccatgctgctctgcagtgctttgctcactgagaagatttggtctcatgtggagactggcatctcagttatagtggaggggtttcccctgagatcccactgaaacagacacgcagctgtttttctagtagcagtattggcgaaggtgctgatcaattactgacttaatctggtgaactggacaggcgtgactttttttttttttttttttttttgagagacagtctcactttctcacccagactagagtgcagtggcgcgatctcaactcactgcaacctctgcctccctggttcaagtgattctcctgcctcagctacaagcacccgccaccatgcccagttactttattgcatttttagtagagacgtgggtttcaccatgttggccaggatggtctcaatctcctgacctcgagatccacccacttcggcctctcaaagtgctgggattacaggcgtgagccaccacatccggacaatttttttttttttatagagaggggtcttgctatgttgcccaggctggtctcgaactcctgggctcaagaaaccctcccaccttggcctcccaaagtgctggaattacagttgtgaaccactgctcctgaccaatttttttttttattttttttactttgtagagacaggatctccatatgttgctcaggctgaccttgaactcctgggctcaagtgatcttcccaccttggcctctcaaagtgctgggattatagatataagccactgtgcccagcccaggggtggatttaggaggctttgttggtgcctattaaccttaaactgaaaccactggtcctcagctcataggtttaagttcatttccccaagaatttagcctaactttccactcgctgatgctttaaagcaaaaacctgtggtgtctgtttactcttcaaaagaaaaaactccactcatagctgctaataacagcaaatgctcctgaagcatgcatgctatgccagccacgtttctcagcactttacaaatattaatttatctgatcctgacaacagttccgtggggcaaacaccttattcccgcctgatagatgaggaaacagaaacagggagaggtgactttgtgacccccaaggtcacaaagagggtaagggggaaactgtttgaactcgggcaagtggctctgggggcgatcattgcttattaatgactgcagcaagtggtaaacaaaggatagctggaggcttgttacttcatcgagacctgtattcgtttcccatggctgccataacaaattaccacgagcttggtggcttaaaacactagaaatgtatgttccacagtcctgggtgccagaagttcaacatcaaggtgtgggcagggctgcaccccttccaaagacactggttgggggatcttcctttccctttccagctctgcagactccaggttctctgggcttgtgacaccaccattctaatccctgccttcatcttcatgtggccctttctgtgtgtctctttgcctttttctttctggctcttataaggacacttgtcattggatttagggcccagtttaatccaggataatctcatgttgagattattaccctgattacatctgcaaagaactttattccaagtaagctcacgttatgggattctgggtgaatatgtcttttatggaccaccattcaatccactatcaggccctattattctaccaactttagagatacaaaaagtgaagccctaagaggtgtggtcacacagatcttcagcatcaggcatgggcttgaactagggtcctacccctactcaaagtctactttctgaagcgtggcctgcctctctcacctcccaggtgaacggtgtggacatgaagctgcccgtggtgctggccaacggccagatccgtgcctcccagcatggttcagatgttgtgattgagaccgacttcggcctgcgtgtggcctacgaccttgtgtactatgtgcgggtcaccgtccccggaaactactaccagcagatgtgtggcctgtgtgggaactacaacggcgaccccaaggatgacttccagaagcccaatggctcacaggcaggcaacgccaatgagttcggcaactcctgggaggaggtggtgcccgactctccctgcctgccgcccaccccttgcccgccggggagcgaggactgtatccccagccacaagtgtcctcccgagctggagaagaagtatcagaaggaggagttctgtgggctcctctccagccccacagggccactgtcctcctgccacaagctggtggatccccagggtcccttgaaagattgcatctttgatctctgcctgggtggtgggaacctgagcattctctgcagcaacatccatgcctacgtgagtgcttgccaggcggctggaggccacgtggagccctggaggactgaaactttctgtcgtgagtgagggagagccggaggggcagggaggggagagcttgaggcacagaaggggtagaccctgggccttgcagcccctccctccccagggctctgatcggcaccccctccttgcagccatggagtgccctccgaacagtcactacgagctctgtgcggacacctgctccctgggctgctcagctctcagtgcccctccacagtgccaggatgggtgtgctgagggctgccagtgtgactccggcttcctctacaatggccaagcctgcgtgcccatccagcaatgcggctgctaccacaatggtgtctactatgaggtaggaacctagtcatctggggcagaatatggggcctcacccctcccactgctcatcagccccacggcctgtctacttggcctcttatttatttcttttagagtcagggtctcactccgtcacccaggctggagggcaagggtaccatagctcactgcagccccgaattccttggctcaagcaatccttccacctcacctcccaagtgtctgggactataggcatgcaccaccaagcccagcgaatttttaattttcctgtggacacatagagatgggggcgaatcactatgtagctcaggctggtcttgaactccaggcctcaagccatcctcctaccttggcctccccaagggctgggattaatggcatgagccaccaggcccgacccactgagcctctttttttttttttttttttttaaatgacatagtcttgctctgtgcccaggccggagtgcaacctccactgcctgggttcaagctcactgcaacctcagcatcccaggttcaagtaattctcctgcgccagcctcccaagaagctaagactacaggcatgtgccaccacacatggttaatttttgtagttttgttagagatgggattttgccatattggccaggctgctctcaaattcctgactgcaagtgatcctcctgcgttggcctcccaaagtgtgagcattacaggcgtgagccaccacagctagtccactcagtctcttcaatgtctcttgtacccactcctttccccgtccccatggccctcccttggtccagctggtcctctcccacctgggtccctcccagctcctacctttgctccctctggtccaccctccacgtggcagtggtaaagatctttctaaatatgaccacgggctctgaagctttaaaccctcccctgactccccaggtcaagttgtggctttgccttccaggtctggacgaagggagcctttctgaccacaaagacaagattttcatgtgttataccagctgctaacaccctctacttccctctcccactctgtccccgttggtcctttttctttgactggagcatgtgtttgtccaatgtccatctcccttggggactgtgagctctcctggggtggaaccctctctctgttgttctcctcacatgaataataataataataacagaaaatgtgtagatagtgcttactatgtatctggtaccgttttaagtgctatgtgtgcatatttttatatatgcattacatatctaaaaactttttattctgaaaacgttcaaacatgcaaaaatcaagagaacagtggaatgactgtccatgtacttacccatcacttagcttcagaaataagccacattctcccaatcttgtttcatgtctaccccactcatctctcctatctgaatgatttaagggaaacccttttcctttcatctgcacttcacatgtgttattaacttggttatatttccataggcaggtgctactattatctgcaatttgcaaatcaggaaactgagccaacaagaggtgaggtaacttgcccagagtcacacagttcggaaacagcagaaacgggcttcaagcccaggcgatctgcccttagttactgtgtcacaccatttctcctacagcagacattgagcggatattttggaatgaatgagttaatgaagaaaagtgaatgaacaaatgtacaaatgaatcatggcctcaaagccatgctgtgcctcatcttcacagacaacgggccatcctgctgagagatgtcccttgtctgtgatgtctgccaaacccctctgtgccagaacgccagagatgtgagagtcggctcccacccgtggtgtccctgatggccgttccctctctccccacagccggagcagacagtcctcattgacaactgtcggcagcagtgcacgtgccatgcgggtaaaggcatggtgtgccaggaacacagctgcaagccggggcaggtgtgccagccctccggaggcatcctgagctgcgtcaccaaaggtgctgagctggggttgggcctggggctgatgcgactagggatggaggacaaggactctggggctgagggtggtgtaactggggtgtccatggcgggaggtgcacaggactaaagattgaggtcacagacctagggacccctgggctgggtttcatagggccagggttacctactatgggaggcagggacccttaaggggaatctaggctgtgcggaccctcagaggtaagtttctcagggtggctgtcagaggccctcagtataaggcaggcccaggcgcgcctttgctctaatgtgctacatggcaaatgtttaagctcgcagggtgcatggtctcgttccagctactcactctgccactgtggcatgaaagcagccgtagactatgtaagtgaagaggtcaggctcctataagactttagaatacaagagcagcagcctagggggccatcgtgagcagaacactgatgtgtgggattagttgtggggttcagacactagcagcacagggcaggggagagactgggatcccaggggcagggacagagagcagagttctgagtctcaggcacagagaccccaccaaggcaggatgttggatatggggacccatctcaagtggaagatcaggatttctaggagtatagtctctgatgtgggaatccccgagactaaatctgggacacagccacccccagggctcatttcttagggtgaagagcagagaactctcctccccctaaggataagagaatgggagctcccgcaccaaggagtgggggctaagactctcagggctgatgagcaggataatggggactcccaggaatggggggtatatcactcagcatctagtcgagagacagaaagcgtatggccatttgaatgaggaaagtttaattaaacatttacttattaataggagattaactattaagggtaaagagggcctgctgccgtggctcacacacccagcactttgggaggatcgcttgaggccaggagtttgagaccagcctgggcaacatagtgagacccctgtctccacaaaaaattgaaaattagccaggtgtggtgatgcgtgcctgtggtcccagctatttaggatgctgaggtaggaggatcagttgaccccaggatttcgaggctgcagtgagctatgattgcaccactgctctccagcctgggcaagacagcaagaccttgtctctttacaaataaataaataaacataaataagaaacggtaaagagagcactaaagaataccaccaaagcaaacataagaagtagctcccactctagggctaaggtagaggcctcaaggaagggagacattggcccctcctcttcaaggaggggagaatcagccccaaggctgagtccagtctcactgcagctgtagcccactgggtggcacagaggtttctgcaggctggacttggcaagaagggaacccctcactgggaagccagctgcggccagtggcactcgctgaatgtggccccgcaccctggccagagctggaaggaccaaactggctggaatccagaccagtagcccctccctcctgtggtgactctccagcgccctctgttgacaaagcttaactccgtgggtatatttgaagctgagaggcggtacattgataatggacacaggaggaaggagacgtttgaaggctggcctctcccacacagcggttccgcaagctggggtcacagatgtagtaactgtccgaacagggtctcggacacagaagccctccaggacagggcctcagcagtgagacacgctcaaggctactgtcttgaacacagcaaccctcagggatggagtcttgcactgagggagcccaggccatgagacttagctagttagggtctcaaacgtttgaaatcctgctgagaccctggcactgggctcttgccagagatcaccccagggccgtagtcttgggcatagaggcctccaggacctggagaaattggagaccaatttctctcaaatgtggagatgtccagggggctgagatctcaggcatggggggccctgaggcctagatctttttttttttttttttttttttgagataagtctcactctgtcgcccaggctggagtgtagtgatgcaatcatagctcactgcagcctccatctcctgggctcaaacaattctcccgcctcagccttctgagtagtgggggactacaggcacacaccaccatgcctggctcatttattaagttatttgtagaaatggggtcttgctatgttgcccaggcctggtctcaaactccagggctcaaatggtcctcccgtctcagcctcttaaagtgctgggattacaggcctgagccaccacacctggcctggggcccaggtcttgaacacagagaaccctggggctgggatctcagacatggatgctctcagggctggcatcgcagacacaaggacccctggggcacagatctcaactggggtcaagtgcaccttttctctaaagggctagatggtaagtgtttaagcttgcaggctataccttctggatcacaactactcactctgccactgtggtgtgaaagcagccgtagcctatgtaagtgaagacggtgaggtttctataaagctttagaatataagaacaggctgaactctcaagcaagggcacaatggaaactgtaacttaaaaacagaaatctgcaggaccagtgtctcaaacatggggaccccagagactgggtcttaggtgcagggactccaggacctcagtctcacacagcagatggcagggcctcagtctcagaggcagggggactctagggcctaagtcttggctgtagggacctctggggccgggatctcagatatgggaactttgacacccgagacatagacacagtccaccatgatgcctcagtgtcagatgtgcaggactcccaggggctggtcttgaaaatagcaggccgggcgtagtggctcaggcctgtaatcccagcactctgggaagctgaggtgggcaggtcacttgaggtcaggagctcaagaccagcctgggcaacatggtgaaaccctgtctctactaaaaatacaaaaatcagccaagcatgctggtgggcacctgtaatgccagctactcaggaggctcagtcaggacaatctcttgagcccgggaggcagaggttgtagtgagccaagattgcatcattgctctccagcctgggtgacagagaaagactccatctcaaaaaaccaataaaacaaaacaaaacaaaataaaaaagcaaactataggacctgggtcctagacatgaggactctggaatgtggtcttgcctgcagtaaccctcagatccctggcacagactggggtagatgtggagggagcggccatcctttacaatgggcagcccctcaaggtcctcctccctcttctgtccccagacccgtgccacggcgtgacatgccggccacaggagacatgcaaggagcagggtggccagggcgtgtgcctgcccaactatgaggccacgtgctggctgtggggcgacccacactaccactccttcgatggccggaagtttgacttccagggcacctgtaactatgtgctggcaacaactggctgcccgggggtcagcacccagggcctgacacccttcaccgtcaccaccaagaaccagaaccggggcaaccctgctgtgtcctacgtgagagtcgtcaccgtggctgccctcggcaccaacatctccatccacaaggacgagatcggcaaagtccgggtatgtgtggcaggatggtcccctgaggtccccgggagggcaggagggatcctgacgaccacagttagcagctcaaggctctttgtcttcacctgggcctgaaacaaactgtcaacaaagagaataattgcaacaaaaatgtcaccctgttactgggaattaaatgagcctagcccctggcaaagggctttaacataggacctcagcatttgccttttttatagacctgggtttcaatccagcctctcctccttatgagctatgtgatgctgggcagttcacttggtaggcctcagtttcctcatctgtgaagtgggcatcgtatcagggcctcccccacagcaaggccgtgcatgtcacatgctgagctcagagtctagtccaggtgaacagtcgtttgagtgtcggtgagggaaaagtgagaggcccagagaccaggacatggagagaaatacagggagatcgggctaggtgcggtggctcacgcctgtaatcccagcactctgggagaccgaggccgatggatcatctgaggtcaggagttcgagacaagcctggctaacatggtgaaattccgtctctactaaaaatacaaaaattagctgggtgtggtgatgctcctgaattctcagctactcaggacactgaggcaggagaattgcttgaacctgggaggcagaggttacaagagccgagactgcaacactgcacacaagcctcggtgacatagtgagactccgtctgaaaaataaaaaaagtaatcaagaaaaagaaatatagggagatgggggagaggaatgggctatcctttctgcccaaggaaatggagatgtagcttgatggcagctcacatggagagactgagtgatgcagcagagtaggcactgaataaatgatggtgagtgagtggaagagatgcacaaagaatgagggaggtagggaggaagggaaaagggtgagacagagacagagagacagaaagagagagagagagacagagacagagagagagaagacccagaggcatagccttaggtgaagacagggggagagagacacagagagagagacagagacaggggagggagatagagatgaagggagaagatctagaaaaagtaaagtgaggtttcgttccccaagacctgggctagaacaactgtccacagtgtgtcagatgacaatccaactctcgggggaaggccctggcctctcccagcccccggtgggatgagagagagggaggcagagggccagagctggggccgtaaaacctccagtgacccgtttgccttccctccttcccccaggtgaacggtgtgctcacagccttgcctgtctctgtggccgacgggcggatttcagtgacccagggtgcatcgaaggcactgctggtggctgactttggactgcaagtcagctatgactggaactggcgggtagacgtgacgctgcccagcagctatcatggcgcagtgtgcgggctctgcggtaacatggaccgcaaccccaacaatgaccaggtcttccctaatggcacactggctccctccatacccatctggggcggcagctggcgagccccaggctgggacccactgtgttgggacgaatgtcgggggtcctgcccaacgtgccctgaggaccggttggagcagtacgagggccctggcttctgcggacccctggcccccggcacagggggccctttcaccacctgccatgctcatgtgccacctgagagcttcttcaagggctgtgttctggacgtctgcatgggtggtggggaccgtgacattctttgcaaggctctggcttcctatgtggccgcctgccaggctgctggggttgtcatcgaagactggcgggcacaggttggctgtggtgagtgttgggggagcagaggcggggctgggggcggggtcccatctcttcggggctggtttggtttcactctggtccttctgggtctctttgttttcttttttctctgtttgtctctctgtttcttggtgctcgtctctgggcctcgctttgcttgtctctatctgtctgtttctcattctctagctccctcagtttctgcttgggtctcctggtgtctcgctttctcccatttctttctctgtgtcctctctctgtgtcttgttttctgtctccccctttctctgtctgctccctagtgtctctctctgtctcctcccaccctgttctgggaccccacccctaacacccttctttctgtttctctccttcctgctccttcatctgcccacagagatcacctgcccagaaaacagccactatgaggtctgtggctcaccctgcccggccagctgtccgtcccctgcaccccttacgacgccagccgtatgtgagggcccctgtgtggagggctgccagtgcgacgcgggtttcgtgttaagtgctgaccgctgtgttcccctcaacaacggctgcggctgctgggccaatggcacctaccacgaggcgggcagtgagttttgggctgatggcacctgctcccagtggtgtcgctgcgggcctgggggtggctcgctggtctgcacacctgccagctgtgggctgggtgaagtgtgtggcctcctgccatccggccagcacggctgccagcccgtcagcacagctgagtgccaggcgtggggtgacccccattacgtcactctggatgggcaccgattcaatttccaaggcacctgcgagtacctgctgagtgcaccctgccacggaccacccttgggggctgagaacttcactgtcactgtagccaatgagcaccggggcagccaggctgtcagctacacccgcagtgtcaccctgcaaatctacaaccacagcctgacactgagtgcccgctggccccggaagctacaggtgaggagggctgtgggccagacaggagcaagtgccagctctggggttgcctgagatggtaagggcttcaccattcccctgggcacctttcacagcttagctggggcatgatggaagggtcagagtgtacgcctaggagcctgacggcttggcacagcagcttcttcctctgtgagcctagtgtattcctctgtaaactggtctaggaaaagtacctgttttcgagaaggataaggagtcagtgacatgagccagtagaggctctttgtttttcttttctttttttctttcttgcttttctttctttctttctttctttcttttcttagcctgactctgttgcccaggctggagtgcagtgacaggattagggctcactgcagcctggaactcgtgggctgaatcgatcctcccgccttggcctccacctcccaagtatctgtgactaaaggcacacgccaccacgctggctaatttttcatttttttgtagagatgggggtctcactatgttgcccaggctgatctgaacttctggcgtcaagcgatcctcccatctcggccttccaaagtcctgggattgcaggctttgccaccaggcccggcctatagatgctcattattattttcagcgggaggtgacatgctctgggtcccacagctagtaggtagtggggccaggattcaaacccgtgtttgctccgttcaccgctcccccactgcccacaggtggacggcgtgttcgtcactctgcccttccagctggactcgctcctgcacgcacacctgagcggcgccgacgtggtggtgaccacaacctcagggctctcgctggctttcgacggggacagcttcgtgcgcctgcgcgtgccggcggcgtacgcgggctctctctgtggcttatgcgggaactacaaccaggaccccgcagacgacctgaaggcggtgggcgggaagcccgccggatggcaggtgggcggcgcccagggctgcggggaatgtgtgtccaagccatgcccgtcgccgtgcaccccagagcagcaagagtccttcggcggcccggacgcctgcggcgtgatctccgccaccgacggcccgctggcgccctgccacggccttgtgccgcccgcgcagtacttccagggctgcttgctggacgcctgccaagttcagggccatcctggaggcctctgtcctgcagtggccacctacgtggcagcctgtcaggccgctggggcccagctccgcgagtggaggcggccggacttctgtcgtgagtactgctccatgcatggtccacatagtagggtctctccctgcccttcccaggactgtaggacagcagccccttcctcctccatgaggctgaggggccaccttccttcccgagctcggtatctactgtcaggaaacaccttggcactgacacactgaaatgccccaagtcaggtactgcagtgagagagagtccgttagaaacacctagtcagagtgtgggcgcggtggctcacgcctgtaatcccagcaatttgggaggccgaggcgggcggatcacctgaggtcaggaggtcgagactagcccggccaacatggtgaaaccccacctctactaaaactacaaaaattatccgggcgtggtggcgggcacctgtaatctcagctactcaggaggctgaggcaggagaatcacttgaacccaggaggcagaggttgcagtgagccgagatcgtgccactgcccttcagcctgggtgacagagattccatctccaaaacaaaaaacaaacaaacaacaaacaacagaaaaaaaaaaagaaagaaaagaaacctggggtccaggacactcttagggattggtgatccatgctttcaggtatccaaggcatgtagattgggatggctgaccctgcctctgtcacatagcaaagtaccccttgttaggaagacctagtgagtttcagctggtcagagggcccaggtctgttgcacacactgaaatacacctagtcacatggaattagtcgcataccttcagtgatatctgcttaaattttatactgactggtcagatacactcagaaagaaacaggatcctggcatagccttgggcagatccacacagatgcatggttagatagtcctaggcggttcccttcaggcaggtctcctggtcacaggtatcctgccaacttcacccaggcacacccttaggcagaccatgtcagaaggactctgggagatgctgcatgtcagacacccacagctgggtgccctcaggcagagccataccctgagatacatgtggccccacaccccagtcacattcacacgctgagatgcccatagtcagttctgatcctgcataccccgaatagatataagtgatccatttcacccaggtaagcctggcttacatagtgagaccccatctctacacaaaataataataaatcagccagatgtggtggcttactcctgtagtcccagctaatcgggaggctgaggccagaggattgcttgaggtttaggtggaggctgcagcgagctgtgattgcgcctctgcactccagcctgggtgagatagagtgagagcctgtctcaaaaaaaaaaaaaaaaaaaaatcagccaagcagagtcatttgatcttcagaaatatttggtcagagagacctgggcatgtcccctcccattccaggtcccacgctgagtcccccagttagatgtcctggatcacatgtgcctacccagagacgcccaagttggcctgagcagttttcccactcagggcctcccaagactgcgactcaaacacctacctggctgatgcccaccttgtccccacagccttccagtgccctgcccacagccactacgagctctgcggtgactcctgtcctgggagctgcccgagcctgtcggcacccgagggctgtgagtcggcctgccgtgaaggctgtgtctgcgatgctggcttcgtgctcagtggtgacacgtgtgtacctgtgggccagtgtggctgcctccacgatgaccgctactacccactgggccagaccttctaccctggccctgggtgtgattccctttgccgctgccgggagggcggtgaggtgtcctgtgagccctccagctgcggcccgcatgagacctgccggccatccggtggcagcttgggctgcgtggccgtgggctctaccacctgccaggcgtcgggagatccccactacaccaccttcgatggccgccgcttcgacttcatgggcacctgcgtgtatgtgctggctcagacctgcggcacccggcctggcctacatcggtttgccgtcctgcaggagaacgtggcctggggtaatgggcgagtcagtgtgaccagggtgatcacggtccaggtggcaaacttcaccctgcggctggagcagagacagtggaaggtcacggtgagagcagatggggagcagggggcgaggggcctgtgggtaggtggggcacaggcagcgctcagcccaggagttgggggcacaagagatgagagtgcatgtgcgaggcctggggtctctgaggacagaagatgccagtcagaaccgagtgggaagccaatgagggaggtgtcatcagggacttgggagctgctcccccatctctgtccctcagtctccaccctctctttacctccatgcattgacttttctctccaaatttctcccaccctctcctccctcccactccatcctctctccacctcagtcctggattctgccctactcacctccctagtctgccacttattggcaggacgtggtgccatcagaggttgagaaagtccgagtttggagaagcttcatggacagaggacaatctgtgggtgacactctcaccgccttaacaacaacaacagcagctatagtttctatacagctgactgcacaccttttggctgccaggcacttcacgtccatggtgtctgtatgcttgcaacagggactgcaggcactatgacttgctttatttttcagagtgggatggcccatcactggcccatagtcccccagcaaaggtggagcttgaaccccgtgctgctctgcagtgcttttcttactgagaagatttggtctcatgtggagactggcatctgagttacagtggaggggtttcccctgagatcccactgaaacagacacgcagctgtttttctagtggcagtattggcgaaggtgctgatcaattactgacttaatctggcgaactggacaggcgtgactttttttttttttttttggcacagagtctggctttgtcacccaggctggagtgcagtggcgcgatctcggctcactgcaacctctgcctccctggttcaagtgattctcctgcctcagcctccagagtagctgggattacaggtgtgcaacactatgcccaggaaatttttgtatttttagtggggacgggtttcaccatgttggccagtctggtctccaactcctgagctcagtgatctgccggcctcagcctcccaaagtgctgggaatagaggcatgagccactgtgcccggccgacatgcaggacttaattgaatatattccctaatgtttcccaagctcctagaatagcccctgacatacagcgcctaaatacacaggagttgttgatgttcttgttagttgcttcttactgaaacccccagcttccctacagatgtgggagctcttattaccccgcagtttacagctgaggaaactgaggcaaggctaagtcagttgcccttacccaccgcccagccctgcttgggaagtgtggcagttgaccatctttttaggagactcagccaggagcatgtctttctcctgccttctcctctgattcttcacatttccaaaagaatccggtgtgcactgtctgtgataaggaagggtaagaaagcatgttaatcaggggttgatgtatttatttattttttagagacagggtctcgctctatcaccaaggctggagtgcagtggtgtgatcctagctcactgcagcctcaaactcctgctctcaagcaatcctaccacttcagcctcctgagtggctgggagtacaggcatgcaccaccatgcccagttaatttgttttcttttttattttgtagagacaggatctcgatatattgcttaggctgaccttgaactcctgggctcaagtgatcttcccgccttggcctctcaaagtgctgggattatagacatgagccactgtgccctgtccaggggtggatttaccaggctttgttggagcctagtaaatctttaactgaaaccactggtcctcagctcataggtttaagttcatttccccaagaatttagcctaactttccactcgctgatgctttaaagcaaaaacctgtggttctgtttactcttcagaagaaaaacctccactcatagctgctaataacagcaaatgctcctgaagcatgcatgctatgccagccacgtttctcagcactttacagatactaatttatgtgatcctgacaacagttccatggggcaaacgccttattcccacttgatagatgaggaaacagaaacagggagaggtgactcacttgcccaaggtcacaaagagggtaagggggaaactgtttgaactggggcaagtggctccgggggcgatcattgcttattaatggctgcagcaagcggtaaacaaaggatagctggaggcttgttacttcatcgagacctgtattcgtttcccatggctgccataacaaattaccacgagcttggtggcttaaaacactagaaatgtatgttccacagtcctgggtgccagaagttcaacatcaaggtgtgggcagggctgcaccccctccaaagacactggttgggggatcttcctttccctttccagctctgcagactccaggttctctgggcttgtgacaacaccattctaatccctgccttcatcttcatgtggccttttctgtgtgtctctttgcctttttctttctggctcttataaggatactagtcattggatttaaggcccaatttaatccaggataatctcatgttgagattattaccctgattacatctgcaaagaactttattccgagtaagctcacgctatgggattctgggtgaatatgtcttttggggaccaccattcaatctactatcaggccctgttattatatccatttaataaataggaaactgagggcctaaggggtgaggtcacaaagatcagcatcaggcatgggcttgaactagggtcccaccctcactcaaagtatactttctgaagcgtggcctgcctctcttcccctcccaggtgaacggtgtggacatgaagctgcccgtggtgctggccaacggccagatccgtgcctcccagcatggttcagatgttgtgattgagaccgacttcggcctgcgtgtggcctacgaccttgtgtactatgtgcgggtcaccgtccctggaaactactaccagctgatgtgtggcctgtgtgggaactacaacggcgaccccaaggatgacttccagaagcccaatggctcgcaggcaggcaacgccaatgagttcggcaactcctgggaggaggtggtgcccgactctccctgcctgccgccgcccacctgcccgccggggagcgagggctgtatccccagcgaggagtgtcctcccgagctggagaagaagtatcagaaggaggagttctgtgggctcctctccagccccacagggccactgtcctcttgccacaagctggtggatccccagggtcccttgaaagattgcatctttgatctctgcctgggtggtgggaacctgagcattctctgcagcaacatccatgcctacgtgagtgcttgccaggcagctggaggccaggtggagccctggaggaatgaaactttctgtcgtgagtgagggagagccggaggggcagggaggggagagcttgaggcacagaaggggtagaccctgggccttgcagcccctccctccccagggctctgatcggcaccccctccttgcagccatggaatgccctcagaacagtcactacgagctctgtgcggacacctgctccctgggctgctcggctctcagtgcccctctgcagtgcccagatgggtgtgctgagggctgccagtgtgactccggcttcctctacaacggccaagcctgcgtgcccatccagcaatgtggctgctaccacaatggtgcctactatgaggtaggaacctagtcatctggggcagaatatggggtctcacccctcccactgctcatcagccccacggcctgtctacttagcctcttatttatttcttttagagtcagggtctcactcttgtcacccagactggagtgcagtggtaccatcatagttcactgcagccccaaattccttggctcaagcaatccttcacctcacctcccaagtacctgggactataggtgcgcaccaccaagcccagcgaatttttaattttcctgtggacacatagagatgggggcgtctcactatgttgctcaggctggtcgtgaactccaggcctcaagccatcgtccccccttggccacccaaagtgctgggattaatggcatgagccaccatgcccgacccactgagcctctttttttttttttttttaaagatatagtcttgctctgttgcccaggctggagtgcaacctctgcctctcgggttcaagctcactgcaacctcagcatcccaggttgaagcaattctcttgtctcagcctcccgagtagctaggagtacaggcacgtgccaccacactcggttaattttttgtattttggtagaggtggagttttgccatattggccaggctgctctcgaactcctgacttcaagtgatcctcctgccttggcctcccaaagtgcgagcattacaggcgtgagccaccacagctagtccactcagtctcttcagtgtctcttgtacccactcctttccccgtccccatggccctcccttggtccagctggtcctctcccacctgggtccctcccagctcctacctttgctccctctggtccaccctccacgtggcagtggtaaagagctttctaaatatgaccacgggctctgaagctttaaaccctcccctgactccccaggtcaagttgtggctttgccttccaggtctggacgaagggagcctttctgaccacaaagacaagattttcatgtgttataccagctgctaacaccctctacttccctctcccactctgtccccattggtcctttttctttgactggagcatgtgtttgtctaatgtccatctcccttggggactgtgagctctcctaggggtggaaccctctctctgttgttctcctcacataaataatattaataataacagaaaatgtgtagatagtgcttactatgtatctggtaccgttttaagtgctatgtgtgcatatttttatatatgcattacatatctaaaaactttttattctgaaaacgttcaaacatgcaaaaattaagagaatagtggaatgactgtccatgtacttacccatcacttagcttcaaaaataagccatattctcccgatcttgtttgatgtctaccccacgtatctctcctatctgaatgttttaaaggaaacccttttctgtttttgttttttttttcccttgagttggagtctcgctctgtcactcaggctggagtgcagtggcgcagttttgcctcactgcaagctccgcctcccgagttcacaccattctcctgcctcagcctcccgagtagctgggactataggcgcccgccaccacgcccgactaattttttgtatttttagtagagacggggtttcaccgtgttagccaggatggtctcaatcttctgacctcgtgatccacccgcctcggcttcccaaagtgctgggattacaagcatgtgccaccgcgcccggcctacccttttcattttatctgaattttacatgtctgaatataacttggttattatctgaatataactcagttatatttccaaaggcaggcgctactatcatctgcaatctgcagatcatgaaactgagccataaagaggtgaagtaactgcccagagtcacacactttggaaacagcagaaatgggctccaagcccaggcgatctgcccttagttactgtgtcacaccatttctcctacagcagacgttgagtggatattttggaatgaatgagtaaatgaagaaaagtgaatgaaccaatgaatgatggccccaaagccatgctgtgcctcatcttcacagacaacgggccatcctgctgagagatgtcccttgtctgtgatgtctgccaaacccctctgtgccagaacgccagagatgtgagagtcggctcccacccgtggtgtccctgatggccgttccctctctccccacagccggagcagacagtcctcattgacaactgtcggcagcagtgcacgtgccatgtgggtaaagtcgtggtgtgccaggaacacagctgcaagccggggcaggtgtgccagccctccggaggcatcctgagctgcgtcaacaaaggtgctgggctgggctgggctgggactggggctgatgggactagggatggaggatggggactctggggctgcgggtagtgtaactggggtgtccatggcgggaggtgcacaggactaatgattgaggttgcagacctggggaaccctagaccaggtttcacagggccagggccacctactttgggaggtagggacccttagggaaaatccaggctgtggggaccctcagaggtagttttctcagggtggatgtcagagaccctcggtataaggcagggacaggcgcgcctttgctctaatgtgctacatggtaaatgtttaagctcgcaggctgtaggttctcgttccagctactcactctgccactgtggcatgaaagcagccgtagactatgtaagtgaagaggtcaggttcctataagactttagaatacaagagcagcagcctagggttccatcatgagcggaacactgatgtgtgggatcgggcttggggttcagacactagcaccaaagggcaggggagagactgggatcccaggggcagggacagagagcagagttctgagtctcacgcacggagacctcaccaaggcaggacattggatatggggacccctcttaactggaagatcaggatttctaggggtatagtctctgatgtgggaatcccccagactttacaaataaataaataaacataaataagaaacggtaaagagagcactaaagaataccaccaaagcacacacaggaagtagccgccactctagggctaaggtaaaagcctcatggaagggagaaattggccccttctcttcaaggaggggagaatcagccccaaggctgagtccagtctcactgcagctgtagcccactgggtggcacagaggtttctgcaggctggacttggcaagaagggaacccctcactgggaagccagctgcggccagtggcactcgctgaatgtggccccgcaccctggccagagctggaaggaccaaactggctagaagccagaacaggagcccctccctccttcagtgactctccagcgccctctgttgacaaagcttaactccgcgggtgtatttgaagctgagaggcggtacatagataatggacacaggaggaaggagacgtttgaaggctggcctctcccacacaggggttccgcaagctggggtcacagatgtagtaactgtacgaacagggtctcggacacagaaaccccccaggacagggcctcagcagtgagacacgatcaaggctactgtcttgaatacagcaaccctcagggatggagtcttgcactgagggagcccagcccatgagacttagctagttagggtctcaaacatttcaaatcctgctgagaccctggcactgggctcttgccagaagatcaccccagggccctagtcttgggcacagaggcctccaggacctagagaaattggagaccaatttctatcaaatgtggagatgtccagggggctgaggtctcaggcatgggggaccctgagacctagatcttttttttttttttgagctaaggtctcactctgtggcccaggctagagtgtagtgtagcttactgcagcctcgatttcctgggctcaaacaatcctcccgcctcagcctcccgagtagtgggggactacaggcacacaccaccacgcctggctaatttattaatctttctgtagaaatggggtcttactatgttgcccaggctagtctcaaactccagggctcaagctatcctcccacctcagcctcttaaagtgctgggattacaggcctgagccaccacacctggcctggggcccaggtcttgaacacagagaaccctggggctgggatctcagacatggatgctctcagggctggcatcgcagacacaaggacccctggggcacagatctcaactggggtcaagtgcaccttttctctaaagggctagatggtaagtgtttaagcttgcaggctataccttctggatcacaactactcactctgccactgtggtgtgaaagcagccgtagcctatgtaagtgaagacggtgaggttcctataaaacttaaaatacaagaacagggtgaaatctcaagcaagggcaccatggaaagtgcaccttaaacacagacccagagccttggtctttaccttggtcttaggtgcgtggactccaggatctcagtctcacacagcaaatggcagggcctcagtctcagaagtaggggaactctaggtactgggtcttggctgtacagacctctggggcccaggtctcaggtatgggacctttgacagccgagacttagacacagtcccccatggggcctcagtgtcagctgtgtgggactcccaggggctggtcttgaaaatagcaggctgggcatgatggctcatgcctgtaatcccaacactctgggaggccaaggttggctgatcacttgatgtcaggagcccgagaccagcctggccaacatggtgaaaccctgtctctactaaaaatacaaaaatcagccaagcatgctggtgggcacctataatcccagccactcaggaggctgagtcaggagaatcactggagcccaggaggcagaggttgcagtgagccgagattgtaccattgctctccagcctgggtgacagagaaagactccatctcaaaaaaacaacaaaacaaaagaaaatgtaaaagcaaactataggaagtgggtcctagacatgaggactctgtaatgtggtcttgcctgcagtaaccctcagatccctggcacagactgggtagatgtggagggagcggccatgctttacaatgggcagcccctcaaggtcctcctccctcttctgtccccagacccgtgccacggcgtgacatgccggccacaggagacatgcaaggagcagggtggccagggcgtgtgcctgcccaactatgaggccacgtgctggctgtggggcgacccacactaccactccttcgatggccggaagtttgacttccagggcacctgtaactatgtgctggcaacaactggctgcccgggggtcagcacccagggcctgacacccttcaccgtcaccaccaagaaccagaaccggggcaaccctgctgtgtcctacgtgagagtcgtcaccgtggctgccctcggcaccaacatctccatccacaaggacgagatcggcaaagtccgggtatgtgtggcaggatggtcccctgaggtccccgggagggcaggagggatcctgacgaccacagttagcagctcaaggctctttgtcttcacctgggcctgaaacaaactgtcaacaaagagaataattgcaacaaaaatatcaccctgttactgggaattaaatgagcctagcccctggcaaagggctttaacataggacctcagcatttgccttttttatagacctgggtttcaatccagcctctcctccttatgagctatgtgatgctgggcagttcacttggtaggcctcagtttcctcatctgtgaagtgggcatcgtatcagggcctcccccacagcaaggccgtgcatgtcacatgctgagctcagagtctagtccaggtgaacagtcgtttgagtgtcggtgagggaaaagtgagaggcccagagaccaggacatggagagaaatacagggagactgggctgggcccggtggctcacgcctgtaatcccagcactctgggagaccgaggccgatggatcatctgaggtcaggagttcgagacaagcctggctaacatggtgaaattccgtctctactaaaaatacaaaaattagctgggtgtggtgatgctcctgaattctcagctactcaggacactgaggcaggagaattgcttgaacctgggaggcagaggttacaagagccgagactgcaacactgcacacaagcctcggtgacatagtgagactccgtctgaaaaataaaaaaagtaatcaagaaaaagaaatatagggagatgggggagaggaatgggctatcctttctgcccaaggaaatggagatgtagcttgatggcagctcacatggagagactgagggatgcagcagagtaggcactgaataaatgatggtgagtgagtggaagagatgcacaaagaatgagggaggtagggaggaagggaaaagggtgagacagagacagagagacagaaagagagagagagagacagagacagagagagagaagacccagaggcatagccttaggtgaagacagagggagagagacacagagagagagacagagacaggggagggagatagagatgaagggagaagatctagaaaaagtaaagtgaggtttcgttccccaagacctgggctagaacaactgtccacagtgtgtcagatgacaatccaactctcgggggaaggccctggcctctcccagcccccggtgggatgagagagagggaggcagagggccagagctggggccgtaaaacctccagtgacccgtttgccttccctccttcccccaggtgaacggtgtgctcacagccttgcctgtctctgtggccgacgggcggatttcagtgacccagggtgcatcgaaggcactgctggtggctgactttggactgcaagtcagctatgactggaactggcgggtagacgtgacgctgcccagcagctatcatggcgcagtgtgcgggctctgcggtaacatggaccgcaaccccaacaatgaccaggtcttccctaatggcacactggctccctccatacccatctggggcggcagctggcgagccccaggctgggacccactgtgttgggacgaatgtcgggggtcctgcccaacgtgccctgaggaccggttggagcagtacgagggccctggcttctgcggacccctggcccccggcacagggggccctttcaccacctgccatgctcatgtgccacctgagagcttcttcaagggctgtgttctggacgtctgcatgggtggtggggaccgtgacattctttgcaaggctctggcttcctatgtggccgcctgccaggctgctggggttgtcatcgaagactggcgggcacaggttggctgtggtgagtgttgggggagcagaggcggggctgggggcggggtcccatctcttcggggctggtttggtttcactctggtccttctgggtctctttgttttcttttttctctgtttgtctctctgtttcttggtgctcgtctctgggcctcgctttgcttgtctctatctgtctgtttctcattctctagctccctcagtttctgcttgggtctcctggtgtctcgccctctcccatttctttctctgtgtcctctctctgtgtcttgttttctgtctccccctttctctgtctgctccctagtgtctctctctgtctcctcccaccctgttctgggaccccacccctaacacccttctttctgtttctctccttcctgctccttcatctgcccacagagatcacctgcccagaaaacagccactatgaggtctgtggcccaccctgcccggccagctgtccgtcccctgcaccccttacgacgccagccgtatgtgagggcccctgtgtggagggctgccagtgcgacgcgggtttcgtgttaagtgctgaccgctgtgttcccctcaacaacggctgcggctgctgggccaatggcacctaccacgaggcgggcagtgagttttgggctgatggcacctgctcccagtggtgtcgctgcgggcctgggggtggctcgctggtctgcacacctgccagctgtgggctgggtgaagtgtgtggcctcctgccatccggccagcacggctgccagcccgtcagcacagctgagtgccaggcgtggggtgacccccattacgtcactctggatgggcaccgattcgatttccaaggcacctgcgagtacctgctgagtgcaccctgccacggaccacccttgggggctgagaacttcactgtcactgtagccaatgagcaccggggcagccaggctgtcagctacacccgcagtgtcaccctgcaaatctacaaccacagcctgacactgagtgcccgctggccccggaagctacaggtgaggagggctgtgggccagacaggagcaagtgccagctctggggttgcctgagatggtaagggcttcaccattcccctgggcccctttcacagcttagctggggcatgatggaagggtcagagtgtacgcctaggagcctgatggcttggcacagcagcttcttcctctgtgagcctagtgtattcctctgtaaactggtctaggaaaagtacctgttttcgagaaggataaggagtcagtgacatgagccagtagaggctctttgtttttcttttctttttttctttcttgcttttctttctttctttctttcttttcttagcctgactctgttgcccaggctggagcgcagtgacaggattagggctcactgcagcctggaactcgtgggctgaatcgatcctcccgccttggcctccacctcccaagtatctgtgactaaaggcacacgccaccacgctggctaatttttcatttttttgtagagatgggggtctcactatgttgcccaggctgatctgaacttctggcgtcaagcgatcctcccatctcggccttccaaagtcctgggattgcaggctttgccaccaggcccggcctatagatgctcattattattttcagcgggaggtgacatgctctgggtcccacagctagtaggtagtggggccaggattcaaacccgtgtttgctccgttcaccgctcccccactgcccacaggtggacggcgtgttcgtcactctgcccttccagctggactcgctcctgcacgcacacctgagcggcgccgacgtggtggtgaccacaacctcagggctctcgctggctttcgatggggacagcttcgtgcgcctgcgcgtgccggcggcgtacgcgggctctctctgtggcttatgcgggaactacaaccaggaccccgcagacgacctgaaggcggtgggcgggaagcccgccggatggcaggtgggcggcgcccagggctgcggggaatgtgtgtccaagccatgcccgtcgccgtgcaccccagagcagcaagagtccttcggcggcccggacgcctgcggcgtgatctccgccaccgacggcccgctggcgccctgccacggccttgtgccgcccgcgcagtacttccagggctgcttgctggacgcctgccaagttcagggccatcctggaggcctctgtcctgcagtggccacctacgtggcagcctgtcaggccgctggggcccagctccgcgagtggaggcggccggacttctgtcgtgagtactgctccatgcatggtccacatggttgggtctctccctgcccttcccaggactgtaggacagcagccccttcctcctccatggggctcaggggccactttccttcccgagctcggtatctactgtcaggaaacaccttggcactgacacactgaaatgccccaagtcaggtactgcagtgagagagagtcagttagaaacacctagtcagagtgtgggcgcggtggctcacgcctgtaatcccagcaatttgggaggccgaggcgggcggatcacctgaggtcaggaggtcgagactagcccggccaacatggtgaaaccccacctctactaaaactacaaaaattatccgggcgtggtggcgggcacctgtaatctcagctactcaggaggctgaggcaggagaatcacttgaacccaggaggcagaggttgcagtgagccgagatcgtgccactgcccttcagcctgggtgacagagattccatctccaaaacaaaaaacaaacaaacaacaaacaacagaaaaaaaaaaagaaagaaaagaaacctggggtccaggacactcttagggattggtgatccatgctttcaggtatccaaggcatgtagattgggatggctgaccctgcctctgtcacatagcaaagtaccccttgttaggaagacctagtgagtttcagctggtcagagggcccaggtctgttgcacacactgaaatacacctagtcacatggaattagtcgcataccttcagtgatatctgcttaaattttatactgactggtcagatacactcagaaagaaacaggatcctggcatagccttgggcagatccacacagatgcatagttagatagtcctaggcggttcccttcaggcaggtctcctggtcacaggtatcctgccaacttcacccaggcacagccttaggcagaccatgtcagaaggactctgggagatgctgcatgtcagacacccacagctgggtgccctcaggcagagccataccctgagatacatgtggccccacaccccagtcacattcacacgctgagatgcccatagtcagttctgatcctgcataccccgaatagatataagtgatccatttcacccaggtaagcctggcttacatagtgagaccccatctctacagaaaataataataaatcagccagatgtggtggcttactcctgtagtcccagctaatcgggaggctgaggccagaggattgcttgaggtttaggtggaggctgcagcgagctgtgattgcgcctctgcactccagcctgggtgagatagagtgagagcctgtctcaaaaaaaaaaaaaaaaaaaatatcagccaagcagagtcatttgatcttcagaaatatttggtcagagagacctgggcatgtcccctcccattccaggtcccacgctgagtcccccagttagatgtcctggatcacatgtgcatgcccagagacgcccaagttggcctgagcagttttcccactcagggcctcccaagactgcgactcaaacacctacctggctgatgcccaccttgtccccacagccttccagtgccctgcccacagccactacgagctctgcggtgactcctgtcctgggagctgcccgagcctgtcggcacccgagggctgtgagtcggcctgccgtgaaggctgtgtctgcgatgctggcttcgtgctcagtggtgacacgtgtgtacctgtgggccagtgtggctgcctccacgatgaccgctactacccactgggccagaccttctaccctggccctgggtgtgattccctttgccgctgccgggagggcggtgaggtgtcctgtgagccctccagctgcggcccgcatgagacctgccggccatccggtggcagcttgggctgcgtggccgtgggctctaccacctgccaggcgtcgggagatccccactacaccaccttcgatggccaccgcttcgacttcatgggcacctgcgtgtatgtgctggctcagacctgcggcacccggcctggcctgcatcggtttgccgtcctgcaggagaacgtggcctggggtaatgggcgagtcagtgtgaccagggtgatcacggtccaggtggcaaacttcaccctgcggctggagcagagacagtggaaggtcacggtgagagcagatggggagcagggggcgaggggcctgtgggtaggtggggcacaggcagcgctcagcccaggagttgggggcacaagagatgagagtgcatgtgcgaggcctggggtctctgaggacagaagatgccagtcagaaccgagtgggaagccaatgagggaggtgtcatcagggacttgggagctgctcccccatctctgtccctcagtctccaccctctctttacctccatgcattgacttttctctccaaatttctcccaccctctcctccctcccactccatcctctctccacctcagtcctggattctgccctactcacctccctagtctgccacttattggcaggacgtggtgccatcagaggttgagaaagtccgagtttgagaagcttcatggacagaggacaatctgtgggtgacactctcaccgccttaacaacaacaacagcagctatagtttctatacagctgactgcacaccttttggctgccaggcacttcacgtccatggtgtctgtatgcttgcaacagggactgcaggcactatgacttgctttatttttcagagtgggatggcccatcactggcccatagtcccccagcaaaggtggagcttgaaccccgtgctgctctgcagtgcttttcttactgagaagatttggtctcatgtggagactggcatctgagttacagtggaggggtttcccctgagatcccactgaaacagacacgcagctgtttttctagtggcagtattggcgaaggtgctgatcaattactgacttaatctggcgaactggacaggcgtgacttttttttttttttttttggcacagagtctggctttgtcacccaggctggagtgcagtggcgcgatctcggctcactgcaacctctgcctccctggttcaagtgattctcctgcctcagcctccagagtagctgggattacaggtgtgcaacactatgcccaggaaatttttgtatttttagtggggacgggtttcaccatgttggccagtctggtctccaactcctgagctcagtgatctgccggcctcagcctcccaaagtgctgggaatagaggcatgagccactgtgcccggccgacatgcaggacttaattgaatatattccctaatgtttcccaagctcctagaatagcccctgacatacagcgcctaaatacacaggagttgttgatgttcttgttagttgcttcttactgaaacccccagcttccctacagatgtgggagctcttattaccccgcagtttacagctgaggaaactgaggcaaggctaagtcagttgcccttacccaccgcccagccctgcttgggaagtgtggcagttgaccatctttttaggagactcagccaggagcatgtctttctcctgccttctcctctgattcttcacatttccaaaagaatccggtgtgcactgtctgtgataaggaagggtaagaaagcatgttaatcaggggttgatgtatttatttattttttagagacagggtcttgctctatcaccaaggctggagtgcagtggtgtgatcctagctcactgcagcctcaaactcctgctctcaagcaatcctaccacttcagcctcctgagtggctgggagtacaggcatgcaccaccatgcccagttaatttgttttcttttttattttgtagagacaggatctcgatatattgcttaggctgaccttgaactcctgggctcaagtgatcttcccgccttggcctctcaaagtgctgggattatagacatgagccactgtgccctgtccaggggtggatttaccaggctttgttggagcctagtaaatctttaactgaaaccactggtcctcagctcataggtttaagttcatttccccaagaatttagcctaactttccactcgctgatgctttaaagcaaaaacctgtggttctgtttactcttcagaagaaaaacttccactcatagctgctaataacagcaaatgctcctgaagcatgcatgctatgccagccacgtttctcagcactttacagatactaatttatgtgatcctgacaacagttccatggggcaaacgccttattcccacttgatagatgaggaaacagaaacagggagaggtgactcacttgcccaaggtcacaaagagggtaagggggaaactgtttgaactcgggcaagtggctccgggggcgatcattgcttattaatggctgcagcaagcggtaaacaaaggatagctggaggcttgttacttcatcgagacctgtattcgtttcccatggctgccataacaaattaccacgagcttggtggcttaaaacactagaaatgtatgttccacagtcctgggtgccagaagttcaacatcaaggtgtgggcagggctgcaccccctccaaagacactggttgggggatcttcctttccctttccagctctgcagactccaggttctctgggcttgtgacaacaccattctaatccctgccttcatcttcatgtggccttttctgtgtgtctctttgcctttttctttctggctcttataaggatactagtcattggatttaaggcccaatttaatccaggataatctcatgttgagattattaccctgattacatctgcaaagaactttattccgagtaagctcacgctatgggattctgtgtgaatatgtcttttggggaccaccattcaatctactatcaggccctgttattatatccatttaataaataggaaactgagggcctaagaggtgaggtcacaaagatcagcatcaggcatgggcttgaactagggtcccaccctcactcaaagtatactttctgaagcgtggcctgcctctcttcccctcccaggtgaacggtgtggacatgaagctgcccgtggtgctggccaacggccagatccgtgcctcccagcatggttcagatgttgtgattgagaccgacttcggcctgcgtgtggcctacgaccttgtgtactatgtgcgggtcaccgtccctggaaactactaccagctgatgtgtggcctgtgtgggaactacaacggcgaccccaaggatgacttccagaagcccaatggctcgcaggcaggcaacgccaatgagttcggcaactcctgggaggaggtggtgcccgactctccctgcctgccgccgcccacctgcccgccggggagcgcgggctgtatccccagcgacaagtgtcctcccgagctggagaagaagtatcagaaggaggagttctgtgggctcctctccagccccacagggccactgtcctcctgccacaagctggtggatccccagggtcccttgaaagattgcatctttgatctctgcctgggtggtgggaacctgagcattctctgcagcaacatccatgcctacgtgagtgcttgccaggcggctggaggccacgtggagccctggaggaatgaaactttctgtcgtgagtgagggagagccggaggggcagggaggggagagcttgaggcacagaaggggtagaccctgggctttgcagcccctccctccccagggctctgatcggcaccccctccttgcagccatggaatgccctcagaacagtcactacgagctctgtgcggacacctgctccctgggctgctcggctctcagtgcccctctgcagtgcccagatgggtgtgctgagggctgccagtgtgactccggcttcctctacaacggccaagcctgcgtgcccatccagcaatgtggctgctaccacaatggtgtctactatgaggtaggaacctagtcatctggggcagaatatggggtctcacccctcccactgttcatcagccccacggcctgtctacttagcctcttatttatttcttttagagtcagggtctcactcttgtcacccaggctggagtgcagtggtaccatcatagttcactgcagccccaaattccttggctcaagcaatccttcacctcacctcccaagtacctgggactataggtgcgcaccaccaagcccagcgaatttttaattttcctgtggacacatagagatgggggcgtctcactatgttgctcaggctggtcgtgaactccaggcctcaagccatcgtcccgccttggccacccaaagtgctgggattaatggcatgagccaccatgcccgacccactgagcctcttttttttttttttttaaagatatagtcttgctctgttgcccaggctggagtgcaacctccgcctctcgggttcaagctcactgcaacctcagcatcccaggttgaagcaattctcttgtctcggcctcccgagtagctaggagtacaggcacgtgccaccacacacggttaatttttttgtattttggtagaggtggagttttgccatattggccaggctgctctcgaactcctgacttcaagtgatcctcctgccttggcctcccaaagtgcgagcattacaggcgggagccaccacagctagtccactcagtctcttcagtgtctcttgtacccactcctttccccgtccccatggccctcccttggtccagctggtcctctcctacctgggtccctcccagctcctacctctgctccctctggtccaccctccacgtggcagtggtaaagatctttctaaatatgaccacgggctctgaagctttaaaccctcccctgactccccaggtcaagttgtggctttgccttccaggtctggacgaagggagcctttctgaccacaaagacaagatttccatgtgttataccagctgctaacaccctctacttccctctcccactctgtccccgtaggtcctttttctttgactggagcatgtgtttgtctaatgtccatctcccttggggactgtgagctctcctaggggtggaaccctctctctgttgttctcctcacataaataatattaataataacagaaaatgtgtagatagtgcttactatgtatctggtaccgttttaagtgctatgtgtgcatatttttatatatgcattacatatctaaaaactttttattctgaaaacgttcaaacatgcaaaaattaagagaatagtggaatgactgtccatgtacttacccatcacttagcttcaaaaataagccatattctcccgatcttgtttgatgtctaccccacgtatctctcctatctgaatgttttaaaggaaacccttttctgtttttgtttttgtttttccttgagatggggtctcgctctgtcactcaggctggagtgcagtggcgcagttttgcctcactgcaagctccgcctcccgagttcacaccattctcctgcctcagcctcccgagtagctgggactataggcgcccgccaccacgcccgactaattttttgtatttttagtagagacggggtttcaccgtgttagccaggatggtctcaatcttctgacctcgtgatccacccgcctcggcttcccaaagtgctgggattacaagcatgtgccaccgcgcccggcctacccttttcattttatctaaattttacatgtctgaatataacttggttattatctgaatataacttggttattatctgaatataactcagttatatttccaaaggcaggcgctactatcatctgcaatctgcagatcatgaaactgagccataaagaggtgaagtaactgcccagagtcacacactttggaaacagcagaaacgggcttcaagcccaggcgatctgcccttagttactgtgtcacaccatttctcctacagcagacgttgagtggatattttggaatgaatgagtaaatgaagaaaagtgaatgaaccaatgaatgatggccccaaagccatgctgtgcctcagcttcacagacaaggggccatcctgctgagagatgtcccttgtctgtgatgtctgccaaacccctctgtgccagaacgccagagatgtgagagtcggctcccacccgtggtgtccctgatggccgttccctctctccccacagccggagcagacagtcctcattgacaactgtcggcagcagtgcacgtgccatgtgggtaaagtcgtggtgtgccaggaacacagctgcaagccggggcaggtgtgccagccctccggaggcatcctgagctgcgtcaccaaaggtgctgggctgggctgggctgggactggggctgatgggactagggatggaggatggggactctggggctgagggtagtgtaactggggtgtccatggcgggaggtgtacaggactaatgattgaggttgcagacctggggaaccctagaccaggtttcacagggccagggccacctactttgggaggtagggacccttagggaaaatccaggctgtggggaccctcagagatagttttctcagggtggatgtcagagaccctcggtataaggcagggacaggcgcgcctttgctctaatgtgctacatggtaaatgtttaagctcgcaggctgtaggttctcgttccagctactcactctgccactgtggcatgaaagcagccgtagactatgtaagtgaagaggtcaggttcctataagactttagaatacaagagcagcagcctagggttccatcatgagcggaacactgatgtgtgggatcgggcttggggttcagacactagcaccaaagggcaggggagagattgggatcccaggggcagggacagagagcagagttctgagtctcacgcacggagacctcaccaaggcaggacattggatatggggacccctcttaactggaagatcaggatttctaggggtatagtctctgatgtgggaatcccccagactaaatctgggacacagccacccccagggctcatttcttagggtgaagagcagagaactctcctccccctaaggataagagaatgggagctccagcaccaaggagtgggggctaagactctcagggctgatgagcaggataatggggactcccaggaatggggggtatatcactcagcatctagtcgagagacagaaagcgtatggccatttgaatgaggaaagtttaattaaagaatcacttacttattaataggagattaactattaagggtaaagagggtctggtgccgtggctcacacacccagaactttgggaggatcacttgaggccaggagttcgagaccagcctgggcaacatagcgagacccctgtctccacaaaaaattgaaaattagccaggtgtggtgatgcgtgcctgtggtcccagctatttaggatgctgaggtaggaggatcagttgaccccaggatttcgaggctgcagtgagctatatgattgcaccactgctctctagcgtgggcaagacagcaagaccttgtctctttacaaacaaacaaataaacagaaataagaaacggtaaagagagcactaaagaataccaccaaagcacacacaggaagtagccgccactctagggctaagttaaaagcctcatggaagggagaaattggtccctcctcttcaaggaggggagaatcagccccaaggctgagtccagtctcactgcagctgtagcccactgggtggcacagaggtttctgcaggctggacttggcaagaagggaacccctcactgggaagccagctgcggccagtggcactcgctgaatgtggccccgcaccctggccagagctgaaaggaccaaactggctagaagccagacccggagaccctccctcctgcagtgactctccggcgccctctgttgacaaagcttaactccgtgggtgtatttgaagctgagaggcggtacattgataatggacacaggaggaaggagacgtttgaaggctggcctctcccacacaggggttccgcaagctggggtcacagatgtagtaactgtacgaacagggtctcggacacagaaaccccccaggacagggcctcagcagtgagacacgatgaaggctactgtcttgaatacagcaaccctcagggatggagtcttgcactgagggagcccagcccatgagacttagctagttagggtctcaaacatttcaaatcctgctgagaccctggcactgggctcttgccagaagatcaccccagggccctagtcttgggcatagaggcctccaggacctagagaaattggagaccaatttctatcaaatgtggagatgtccagggggctgaggtctcaggcatgggggaccctgagacctagatcttttttttttttttgagctaaggtctcactctgtggcccaggctagagtgtagtgtagcttactgcagcctcgatttcctgggctcaaacaatcctcccgcctcagcctcccgagtagtgggggactacaggcacacaccaccacgcctggctaatttattaatctttctgtagaaatggggtcttactatgttgcccaggctagtctcaaactccagggctcaagctatcctcccacctcagcctcttaaagtgctgggattacaggcctgagccaccacacctggcctggggcccaggtcttgaacacagagaaccctggggctgggatctcagacatggatgctctcagggctggcatcgcagacacaaggacccctggggcacagatctcaactggggtcaagtgcaccttttctctaaagggctagatggtaagtgtttaagcttgcaggctataccttctggatcacaactactcactctgccactgtggtgtgaaagcagccgtagcctatgtaagtgaagacggtgaggttcctataaaacttaaaatacaagaacagggtgaaatctcaagcaagggcaccatggaaagtgcaccttaaacacagacccagagccttggtctttgccttggtcttaggtgcgtggactccaggatctcagtctcacacagcaaatggcagggcctcagtctcagaggtaggggaactctaggtactgggtcttggctgtacagacctctggggcccaggtctccggtatgggacctttgacagccgagacttagacacagtcccccatggggcctcagtgtcagctgtgtgcgactcccaggggctggtcttgaaaatagcaggctgggcatgatggctcatgcctgtaatcccaacactctgggaggccaaggttggctgatcacttgatgtcaggagcccgagaccagcctggccaacatggtgaaaccctgtctctactaaaaatacaaaaatcagccaagcatgctggtgggcacctataatcccagccactcaggaggctgagtcaggagaatcactggagcccaggaggcagaggttgcagtgagccgagattgtaccattgctctccagcctgggtgacagagaaagactccatctcaaaaaaacaacaaaacaaaagaaaatataaaagcaaactataggaagtgggtcctagacatgaggactctggaatgtggtcttgcctgcagtaaccctcagatccctggcacagactgggtagatatggagggagcggccatgctttacaatgggcagcccctcaaggtcctcctccctcttctgtccccagacccgtgccacggcgtgacatgccggccacaggagacatgcaaggagcagggtggccagggcgtgtgcctgcccaactatgaggccacgtgctggctgtggggcgacccacactaccactccttcgatggccggaagtttgacttccagggcacctgtaactatgtgctggcaacaactggctgcccgggggtcagcacccagggcctgacacccttcaccgtcaccaccaagaaccagaaccggggcaaccctgctgtgtcctacgtgagagtcgtcaccgtggctgccctcggcaccaacatctccatccacaaggacgagatcggcaaagtccgggtatgtgtggcaggatggtcccctgaggtccccgggagggcaggagggatcctgacgaccacagttagcagctcaaggctctttgtcttcacctgggcctgaaacaaactgtcaacaaaaagaataattgcagcaaaaatgtcaccctgttactgggaattaaatgagcctagcccctggcaaagggctttaacataggacctcagcatttgccttttttatagacctgggtttcaatccagcctctcctccttatgagctatgtgatgctgggcagttcacttggtaggcctcagtttcctcatctgtgaagtgggcatcgtatcagggcctcccccacagcaaggccgtgcatgtcacatgctgagctcagagtctagtccaggtgaacagtcgtttgagtgtttgtgagggaacaagtgagagacccagagaccaggacacagagagaaatacagggagatcgggctaggtgcggtggctcacgcctgtaatcccagcactctgggaggccgaggcgggtggatcacctgaggttagtagttcgagaccagcctcgccgatatggtgaaacccccatctctactaaaaatacaaaaattagctgggtgtggtggtgctactgtaatcccagctactctggaaactgaggcaggagaatcacttgaacctgggaggtggaggttacaagagccaagatttcgacactgtactgcagcctgggtgacagagtgaggatctgtctcaaaaaaaaaaaaaaaaaaaaagaaagaaagaaagaaatatagggagatatgtagggagatcagaggagacagatgggctatcctttctgcccagggaaatggagatagagcttaatggtagctcacagagagaaaatgagggatggaacagagtaggcactggataaatgatggtgagtgagtggaagagacacacagagaatgagggtaggagggaggaagggaagaggagggagagatagacagagagacagaaagagagagagagaagaccaagtgatatagacttaggtgaagacagagggagagagacacagaaagacagagagacagagagacagaagagggagatagagatgaagggagaagatctagaaaaagtaaagtgaggtttcgttccccaagacctgggctagaacaactgtccacagtgtgtcagatgacaatccaactctcgggggaaggccctggcctctcccagcccccggtgggatgagagagagggaggcagagggccagagctggggccgtaaaacctccagtgacccgtttgccttccctccttcccccaggtgaacggtgtgctcacagccttgcctgtctccgtggccgacgggcggatttcagtggcccagggtgcatcgaaggcactgctggtggctgactttggactgcaagtcagctatgactggaactggcgggtagacgtgacgctccccagcagctatcatggcgcagtgtgcgggctctgcggtaacatggaccgcaaccccaacaatgaccaggtcttccctaatggcacactggctccctccatacccatctggggcggcagctggcgagccccaggctgggacccactgtgttgggacgaatgtcgggggtcctgcccaacgtgccctgaggaccggttggagcagtacgagggccctggcttctgcggacccctttcatctggcacagggggccccttcaccacctgccatgctcatgtgccacctgagagcttcttcaagggctgtgttctggacgtctgcatgggtggtggggaccgtgacattctttgcaaggctctggcttcctacgtggccgcctgccaggccgctggggttgtcatcgaagactggcgggcacaggttggctgtggtgagtgttgggggagcagaggtggggcggggggcggggtcccgtctcttcggggctggtttggtttcactctggtccttctgggtctctttgttttcttttttctctgtttgtctctctgtctcttggtgctcatctctgggcctcgctttgcttgtgtctatctgtctgtttctcattctctagctccctcagtttctgcttgggtctcctggtgtctcgccctctcccatttctttctctgtgtcctctctgtgtcttgttttctgtctctccctttttctgtctgctccctagtatctctgtctcctcccaccctgtcctgggaccccacccctgacacccttctctctatttctctccttcctgctccttcgtctgcccacagagatcacctgcccagaaaacagccactatgaggtctgtggcccaccctgcccagccagctgtccgtcccctgcaccccttacgacgccagccgtatgtgagggcccctgtgtggagggctgccagtgcgacgcgggtttcgtgttaagtgctgaccgctgtgttcccctcaacaacggctgcggctgctgggccaatggcacctaccacgaggcgggcagtgagttttgggctgatggcacctgctcccagtggtgtcgctgcgggcctgggggtggctcgctggtctgcacacctgccagctgtgggctgggtgaagtgtgtggcctcctgccatccggccagcacggctgccagcccgtcagcacagctgagtgccaggcgtggggtgacccccattacgtcactctggatgggcaccgattcgatttccaaggcacctgcgagtacctgctgagtgcaccctgccacggaccacccttgggggctgagaacttcactgtcactgtagccaatgagcaccggggcagccaggctgtcagctacacccgcagtgtcaccctgcaaatctacaaccacagcctgacactgagtgcccgctggccccggaagctacaggtgaggagggctgtgggccagacaggagcaagtgccagctctggggttgcctgagatggtaagggcttcaccattcccctgggcccctttcacagcttagctggggcatgatggaagggtcagagtgtacgcctaggagcctggtggcttggcacagcggcttcttcctctctgagcctagtgtattcctctgtaaactggtctaagaaagtacctgtttttgagaaggatgaggagtcagtgacatgagcctatagaggctctttgttttttcttttctgtttttctttctttctttcttttcttagcctgactctgttgcccaggctggagtgcagtgacaggattagggctcactgtagcctggaactgctgggctcaatccatcctcccgccttggcctccgcctcccaagtggctgggactaaaggcgcaggccaccatgctggctaatttttcattttttttgtagagatgggggtctcactatgttgcccaggcgggtctgaacttctgacctcaagtgatcctcccatctcgtccttccaaagtactgggattgcaggctttgccaccaggcccggcctatagatgctcattattattttcagaggggaggtgacatgctctgggtcccacagctagtaggtggtggggccaggattcaaacccgtgttctctccactcaccgcgccccatccccccgccgccatcccccgcccgcaggtcgacggcgtgttcgtggctctgcctttccagctggactcgctcctgcacgcacacctgagcggcgccgacgtggtggtgaccacaacctcagggctctcgctggctttcgatggggacagcttcgtgcgcctgcgcgtgccggcggcgtacgcggcctctctctgtggcttatgcgggaactacaaccaggaccccgcagacgacctcaaggctgtgggcgggaagcccgctggatggcaggtgggcggggcccagggctgcggggaatgtgtgtccaagccatgcccgtcgccgtgcaccccagagcagcaggagtccttcggcggcccggacgcctgcggcgtgatctccgccaccgacggcccgctggcaccctgccacggccttgtgccgcccgcgcagtacttccagggctgcttgctggacgcctgccaagttcagggccatcctggaggcctctgtcctgcagtggctacctacgtggcagcctgtcaggccgctggggcccagctcggcgagtggaggcggccggacttctgtcgtgagtactgctccatgcatggtccacatggttgggtctctccctgcccttcccaggactgtaggacagcagccccttcctcctccatggggctcaggggccactttccttcctctgagcttggtatctcctgtcaccaaacaccttggcactcacacactgaaatgccccaagaaaggtactgcagtgagagagagttagaaacacctagtcagagtgtgggcgtggtggctcacgcctgtaatcccagcactttgggaggccgaggcaggtggatcacctgaggtcaggaagttgagactagcccggccaacatggtgaaatccctgtccctactaaaaatacaagatttatctgggcgtggtggtgggcacctgtaatcccagctaatcaggaggctgaggcacttgaacccaggaggcagaggttgcagtgagccatgatgtgacactgcattccagcctgggcaacagagtgagacaccatctcaaaaaaaaaaaaagaaagaaagaaaagaaacacctagtcagaaacctggggtccaggacactgttgaggattggtgatccatgctctcagatatccaaggcatgtagattgggatggctgactctgcctcagtcacacagcaaggtacccctggttaggaagacctagtgagttacagctggtcagaggcccttggtctgttgcacacactgaaatacacctagtcacatagaataagtcacataccttcagtggtatctgctcagattttgtactgagactaactggttagatacactcagatagaatcaggactcttacatagccctgggcagatccacacagatgcatggttagatagtcctaggcggttcccttcaggcaggtctcctggtcacaggtatcctgccaacttcacccaggcacacccttaggcagaccatgtcagaaggactctgggagatgctgcatgtcagacacccacagctgggtgccctcaggcagagccataccctgagatacatgtggccccacaccccagtcacattcacacgctgaggtacccatagtcagttctgatcttgcataccccgaatagatataagtgatccatttcacccaggtaagcctggcttacatagtgagaccccatctctacagaaaactactaataaattagccagatgtggtggctcatacctgtagtcccagatactcggggggctgaggcaggatgatcgcttgagcccaggaggtggaggctgcagtaagcgcgcctctgcactccagcctgggtgagatagagtgagaccctgtctcaaaaaaataaaaaataaataaataaataaataaataaaaatcaggcaagcagagtcatttgatcttcagaaatatttggtcaggctaacacataacctggtcagagagaccagggcatgtcccctcccattccaggtcccacactgagtcccccagttagatgtcctggatcacatgtgcatacacagagacactcaagttggcctgagcagttttcccactcagggcctcccaagaccccgactcgaacacctacctggctcatgcccaccttgtccccacagccttgcagtgccctgcccacagccactatgagctctgcggtgactcctgccctgtgagctgcccgagcctctcagcacccgagggctgtgagtcggcctgccgtgaaggctgtgtctgcgatgctggcttcgtactcagtggtgacacctgcgtacccgtgggccagtgtggctgcctccatgatggccgctactacccactgggcgaggtcttctacccgggccctgagtgtgagcggcgctgtgagtgtgggccaggtggccatgtcacctgccaggagggcgcagcctgtgggccccatgaggagtgccggttagaggatggtgtccaggcctgtcatgccacaggctgtggccgctgcctggccaacgggggcatccactacatcacccttgatggccgtgtctacgacctgcatggctcctgctcctatgtcttggcccaagtctgccacccaaagcctggggacgaggacttttccatcgtgcttgagaagaatgcagctggagatctccaacgcctcctggttactgtggctggccaggttgtgagcctagctcaggggcagcaggtgagtccatgtgagcctgccctgggggtctgaaggcaacacagccccatctagggggttctgagggagacacgaccccaccctgtaggtatgagagggacattcctctaacatgggaactctggtacctaccctggaaggtttggtgaatggtcccaccgtgggagatttttgtgttgttttgtgacagggtcttgttctgtcacccaggctggagtatattggcgtgatcacagctcactgcaggctcaacctgctgggctcaagcaatcctcccacctcagccccccatgcctagctaattttttatttttggtagagatgaggtcttgctgtcacggccaggctggtctcgaactcctgggctcaagtgatccacctgtctgggcctcccaaagtgctgggattataggtgtgagtcaccacgccaggcctggggcccaagaagtttaagggaaacatgacctgacgttaatgggactgagggagatgcagctctggcctgggagtgggacaggacagccttgcctgtggttctgtgagttcctgacctacccgacccttccacccaggtcaccgtggacggcgaggctgtggccctgcctgtggctgtgggccgcgtgcgggtgaccgccgagggccgaaacatggttctgcagacgaccaaggggctgcggcttctctttgatggcgatgcccacctcctcatgtccatccccagccccttccgtggacggctctgtggcctctgtgggaacttcaatggcaactggagtgacgactttgtcctgcccaatggctcagcagcgtccagtgtggagaccttcggggctgcatggcgggcgcccggctcctccaagggctgtggcgagggctgcgggccccaaggctgcccagtgtgcttggcagaggagactgcaccctatgagagcaacgaggcctgcgggcagctccggaacccccagggccccttcgcgacctgccaggcggtgctgagtccctctgagtacttccgccaatgcgtatacgacctgtgcgcgcaaaagggtgacaaagccttcctgtgccgcagcctggcagcctacacggcggcctgtcaggcagctggcgtggccgtgaagccctggaggacagacagcttctgccgtgagtgtccgtgggtccctcgcaggactctagaccaggtgtaggggcccctcctggcccattccttctatttgcatgtcggagtggtttctccctgtaaaagcgctccctccccaccccctcccaccccacacccacacaacttcttctcccacggcatagtccactggcttccctgctatccctctgactgttccttctcagcctcctgtctgggcccactctgctcaaacctcaaattctcttcttccctagtgttctattctggactctttctgcagtgacctgaaagggagagttggatgggttgggagatctgtggctcacacagaccctccttctacccccgacaagaccatatcccctcagatccccccaagacaaggctgcaggctattaaacaccccgctaaactaggactgtacctctcattcaattccccatgggagggacatcaccagagactctcaggaaaaagcaatggccccttcggctccaggtcagagccaggtctcccctgggcaggacctatacccagggcggtcatccacacccgcggccttagatttgttctcattgttgaccatggacctggtctgtctgtctcaagccctgaactctctcctgactgtcagcccagtgatcctgatttctgacttctggccttcagaactgtgggagaatgaatttcccctgtttaagctacaaagtctgtggtaattgttagggtgtccaagacaccttcccctgggtgtccttaccgtccctcttacctgctgtgttcccaaataaaatcagcatttcacccccagcctgatgctccttccccaaacctggtgggcattgcagaacagccacacctccaccaattgcttagccagagaccagggacttaccacagataattcccttgggtccatatagcccctgtcccaactctgacccctctgcctgtgcccccctatcccagccctgacccctttgcctgtgccccccacaccctggccctgacccctctgcctgtgccccctacccagccctgacccctctgcctgtgccccctaccccggccctcaaccctctgtgtgtaccctccccatcccggccctgacccctctgcctttgcccccccaccccagccctgacccctttgcttgtgcccccaaccccagccctcaaccctctgtttgtgccctccccatcctggcgctgacccctctgcctgtgtgcccccactctggccccgacctctttgcctgtgcccccgaccctggtcctgacccctctgcctgtgccccctaccctggccctcaaccctctgtctgtgccctccccatcccagccctgacccttctgtctgtagccccctaccctggccctgacccctctgcctttgccccctcatgcctgccctgacccctctgcctgtgcctccccaccctgaccctgacctctctgtctacactccctgatgcagcatgttcactttgggctcttcctgtctgtcccactggaagtgagctctgtaggactggggttgagacttttctcagtatttgtgtcctcagcaccgcctaaaacagggctgggtgtgcagtaggcccccttggttatccaggaccctttggaggtgtgactcagccctgcctcctctctctgcagcgctccattgccccgcccacagccactactccatctgcactcgcacctgccagggatcctgtgcggctctctccggcctcacgggctgcaccacccgctgttttgagggctgtgagtgcgacgaccgcttcctgctttcccagggtgtctgcatccctgtccaagattgtggctgcacccataatggccgatacttgccggtgagtaggggcttggggtgggcagagagggtagaagagcttgagagagacccagagattctgtgctgacctcttcaaggctggggacagaggaggtaccgccatatcccagctatgtgacttgatgcaggcaacctccccctattagtctcctgcagcttctgtaaccaattaccgcagacatggtagcttaaacaggagaaattcattctcccacagttctgaaggccaaaagtcagaaatcaggaatactgggctgacatcaaggtgttggcaaggtggcactccctccagagaaatctaggggaggccatgcccagtggctcatacttgcagtcccagccctttgggaggccaaggcgggaggatcacttgagcccaggaattcaaaaccagcttgggcaacatacaattgtttttttaattagctgggcatggtggtgcacacctatagtcccagctactcaagaggctgaggtgggacaatggcgtgaccccaggagttggaggctgcagtgagctatgatcacgctgccgcactccagcctgggtgacagagcaagaccttacctctaaagaaaaaaggaaaagagccaggcacggtggctcacacctgtaatcccagcactttgggagactgaggcgggcggatcacgaggtcagaagttcaagaccagcctgaccaacatggtgaaaccctgtctctactaaaaatacaaaaattagccgggcatggtggtgcgtgcatgtaatcccagctactcaggaggctgaggcaggagaatcacttgaacccaggaggcggaggtggcagtgagccgagattgcgccactacactccagcctgggtgacagaccgagactccatgtcaaaaaaaaaaaaaaaagaaaagaaaagaaaagaaaaaagaaatctaggggaaaatctgtttgttgcctcttccagttgctggttgctgcaggttttccttggttgtggccacatcacaccaacctctgcctcctcttctgagtgtgtcataacacctccctctgcttctctcttataaggatacacgtgattgcatctaaggctcactcagataatccaggagaaattttccatcttcagatccttaattcaatcacatctgcaaacacacttttcccatataaggtgacatttactcattacagggattaggacctgatatcttggggcgggggcatcatttggcccctccttgaactgcattttcttcacctgtaaaatgggactaatcaccatctttgtaccataggtatctgaggatcaggcccgattatacaggaaagatacccactgagcactgggccttgccctgcatgttcatcacactcagtaaaaagaaagagcagtttacagcggggcgcagtggctcacacctgtaatcccagcactttaggaggccaaggcgggcggatcaaaaggtcaggagttcgagaccagcctggccaatatggtgaaaccccgtctctactaaaaatacaaaaattagctgggtgtggtggtggacacctgtagtcctagctactcgggaggctgaggaaggagaatcccgtgaacccgggaagtggaagttgcagcgagccgagattgtgccacagcactgtagcatgagcaacagaccgagactccatgtcaaaaagaaaaaaaaagaaatagcagtttacaacagtgcaaataggtagcccagctaataattgtttaataatatgaattaaattgaagaattgatttattcttgttaataatttttttgagctcttactatgcaccatgtttgttatgggtgttattatttatttatttatttattgagataggattgcactctgtctttcaggcaggagtgcggtggcatgatcacggcttactacagcctcaaactcctgggctcaagcgatctttctgtctcagcttcctgagtagctgggaccacaggctcacactgccatccctggctgactatttaatttttatgtagaaatgggatctcgctatgttgtccaggctggtctcaaactcctgggctcaagcaatcctcctgccttggcctcctaaagtgctgggattacagggatgagccacctctcccggccatgttctggatgttaattcatttaataatcacaacaatcctatgcaatagatactatgactattttccccattttacagatgaagaaattgtgacatagagaagtcagcccgaggctagccattaacatgcagcactaacttgcattgcttgcaaatggagccaaattttgctctttccttgaggtctcactgcctactggaagccatccttgatcccctaggctgggttaggtgcctcctctgaacccctcagctccctatgcttccccatctctgccctgacccctctgcctatgcccgaagtcttggatttgtgagtctggccttcatgggagaggtctggcctagagatgtggaaatcatcattgtagagatggcatttattttgttaattacatttcttcatttcttacctgtatcagttagcttttgctgggttacagatcactccaaaacgttgtggcttaaaacaattattcatttagtttgcaattttgtgactgcagtttaggctggacttggctgggtggttcttctgctatcctctgggcttactcatgtataatatctgtagtcagctggtgggtcagctgaaggctgcctggtctagggtggcctgagctggaagagttatctatgttccatggggtcactcatcttctagggagctagcccaggcttgttctcatggtggctgggcaggattctgtgtatgtgagagagagagaaggaaagagaagctgtgaggtctcttgaggtctaggcttaaacctgttacaacattgcttcttctgtgtttcattgacctaaatatagtcttacggccaacccagattcatagggagggggaaataaactctatttcttaatgggagtctgtaaagtcactctgcatggatacagagggttcaagcagtgtggccatttttgcgatccatcccaccaccataacctggcccctttctgtgcacaggtaaactcctccctgctgacctcagactgcagcgagcgctgttcctgttcctcaagctctggcctgacatgccaggcagctggctgcccaccaggccgtgtatgtgaggtcaaggctgaagcccggaactgctgggccacccgtggtctctgtgtcctgtctgtgggtgccaacctcaccacctttgatggggcccgtggtgccaccacctctcctggtgtctatgagctctcttcccgctgcccaggactacagaataccatcccctggtaccgtgtagttgccgaagtccagatctgccatggcaaaacggaggctgtgggccaggtccacatcttcttccaggatgggatggtgacgttgactccaaacaagggtgtgtgggtaagtttgtgagtagggggtagggaatgtctccctgggcttttgctcttctgattacagtgtccccacattcctggcttcctttctgtcttgcgatctgttttctttatccaggtctctgcggtttagtctctggatttgtatttatctcaatatttcaaacttggtccctctgttctggctgagttctagaggagcaaaaacatactcaagcaacttaatagttttgacattagtatgaatcgagactctatgggttgcaagtgacttaaaaccaaattcaaactgccttaagcaaaattgaatttattagtccatgtagctagaaaatcccaggatagagcctcaggaatggctggatctaggtgccctggcaatattatcagaaatttgtacttccgtctttgagacttgctatttgccaaatcagctttgttctcaaacaggctttccacttacaggtgtaaagacgacccccgcccagctgcccaggcctacaccccaccagcttatctaccttaacagaaaatggttcaataaaagacccaggattatatctcactgagccagtttgggtcacatgcccacccctggagccaatcactgtgactttagggaggaagttccgtgattggtcaaggctgggggtggggggtcacataatgtgtcagggtttcccataacctggttcagtgattcactaggactcacaggactcagcatatagttgtacttagggctaagatgtatcatagggaaaagatacgaagtgaaattgacacagggaaaaggtgcatcgcacaaagtccaggggaaatcatgtgcaagcttccgagagtcctttctcggtagagtcacacaggatgtgcttaattcctccagcaacaaagttgtgatgaaacatgaaatgtcatctgccagggaaattcatagagtctcagtgcctggggttttggtatccacctaccaaaattccagactcctagaaggaaactcccagaagatgctcagcatctttgttcatcactggactataagccgcaggtaggcagggatcctgtccatcttggtcaccagtttgttcccagtacccagatcagggcatggcacctagagggtactcagtaaaaggctggttttgtgaataaactcagccctgctccttttgtgccaggccatgtgctgggtaacagagatgactcggactcagtcgttatacttggaaagcttgcaccctactgagactttccatccactagtcttcatctgtccttcactacacccatcctcccttttcccctccttccttccagcatctattctacccccttctctttttcctatttccttccttctagtctttttcccttccttctttcttccatccacccacccatctgtccatccatccatccacccaccaatccacccatccacccatccatccctccatccatccacccacccacccacccacccatctgtcttttcagatctatctacctatctctccaatcatctggcagaggaaaactcagatacaaaagcatttagagggctgggcatggtggctcatgcctgtaatcccagcgctttgggaggccgaggcgggcagatcacttgaagtcaggagttagagaccagcctggccaacacggcaaaaccctgtcactactaaaaatacaaaaattagccgagcatggtggcacatgcctgtagtcccagctaaggcaggagaatcacttggacccgggaggcggaggttgcagtgaactgagatcgcgctattgcactccagcctgggcgacagagcaagactctatctcaaaaaaaaaactaaaaccaaaaccaaaaaacaaaacaacaacaacaacaacaaaaaacaaacaaacaaaagaaggatttacaaaaaaaaaaaaaaaaaagacaagtcttttaaggaagtttctctagggaatctaactttagaagggttaattcaccaactaacatagacaacagttatgtaaaggaaaaactcacaaagttactggatctgcagcctatgatgaagaaaaagtaattttctcacatgattattatatttgctaaagtcattacttatcttcagacatcagcattgcaaaaataaaggataacgttgttttggttagggaaccaataacttacaggatgtgctcaaagtttgttttattttgcaaactagaaccaggctgagggaggcagatcacctgaatccaggagttcaagaccagcctagacaacacagtgagaccctatctttagaaaaaaatacaaaaattagcctggtgtggtggcacacatctgtagtcctgtagtctcagctactcagaaggctgaggtgggaggattgattgagtctaggaggtcagggctgcagtgagctgtgattgcaccactgcactccagctgggatgacaaagcaaaaccctatcttaaaaaaaaaaaaaagaaaagaaaaagaaaactagaaccataaggatgaccctggggtttgattgtttgtctgtctgtttgcttatctgtctggtacaaaatgcttcccccaccgactttggggtgttgtgtagatccatgggtacgtctctccatccctccactctccatccttttatccgtctatccagatctctagctatcttctcatgtatccattgctccaaatagtgcaaacatccaggtcttcatctctttcagcacctgcctctttgatttagctccatgaacttatcttgtttggggtctccatcctccatcctggtaacacccagctattctggggctgtggcctcacctctgtgtttgctgggcatcccccaccaggtgaatggtctccgagtggatctcccagctgagaagttagcatctgtgtccgtgagtcgtacacctgatggctccctgctagtccgccagaaggcaggggtccaggtgtggcttggagccaatgggaaggtggctgtgattgtcagcaatgaccatgctgggaaactgtgtggggcctgtggaaactttgacggggaccagaccaatgattggcatgactcccaggagaagccagcgatggagaaatggagagcgcaggacttctccccatggtgagggatgtagtatggaaaccaggcttcttggggcaaaggcacctggatcctcatgggatgagggcagtcagggtgggtgtttagtctgcaagcggaggtgctaaatgtctgtgtcttgcagttatggctgatcagtcatccaccaggaacgaagatttcctgaagaagacctggtccctctggaggttgcagtggctgaaggatgcatcatgtgctcctaccctgctctaccgcttttctgggtcacagaggccaaatgtgagagcattgaataaatatcttaagctaagctgc

SEQ ID NO: 787 - DNA, 20 bp, Artificial Sequence
  Forward primer for KRT20
acgccagaacaacgaatacc

SEQ ID NO: 788 - DNA, 20 bp, Artificial Sequence
  Reverse primer for KRT20
acgaccttgccatccactac

SEQ ID NO: 789 - DNA, 20 bp, Artificial Sequence
  Forward primer for MUC2
caagatcttcatggggagga

SEQ ID NO: 790 - DNA, 20 bp, Artificial Sequence
  Reverse primer for MUC2
aacacggtggtcctcttgtc

SEQ ID NO: 791 - DNA, 20 bp, Artificial Sequence
  Forward primer for CCND1
aactacctggaccgcttcct

SEQ ID NO: 792 - DNA, 20 bp, Artificial Sequence
  Reverse primer for CCND1
ccacttgagcttgttcacca

SEQ ID NO: 793 - DNA, 20 bp, Artificial Sequence
  Forward primer for MYC
ttcgggtagtggaaaaccag

SEQ ID NO: 794 - DNA, 20 bp, Artificial Sequence
  Reverse primer for MYC
cagcagctcgaatttcttcc

SEQ ID NO: 795 - DNA, 20 bp, Artificial Sequence
  Forward primer for CD44
agcaaccaagaggcaagaaa

SEQ ID NO: 796 - DNA, 20 bp, Artificial Sequence
  Reverse primer for CD44
gtgtggttgaaatggtgctg

SEQ ID NO: 797 - DNA, 20 bp, Artificial Sequence
  Forward primer for FLNA
cattcagattggggaggaga

SEQ ID NO: 798 - DNA, 20 bp, Artificial Sequence
  Reverse primer for FLNA
acatccacctctgagccatc
